United States Patent Application Publication US 2022/0256795 A1 - sequence listing, part 3

SEQ ID NO: 2 - DNA, 2442980 bp, Glycine canescens
gtgctctgattgataaactggatatctttataaatattagttgaatgaattcaactacaactattataatggcttctgtattatttattctaatttatcttggcttctgtattatttattctaatttatcttgataaaactaggagcatcttgattgataatgttggaattctgcttgatatgctctgtatttaaatctgttggggttcccttttgtattcttcttggccatcagtttgtcattataacacaaaagaaaatccacatttactagtttctagttgtggtgtttagtagattttccatgaggaatatagatacaagatatatcttagattgatagaaatttagcagccgctaagcttctttcttttggatatgaaacaatacagcatgtaggacccctgaaatgttattggcattattaaccaaacttcttgtgatagtggattctattggataattttggagagttattaaacttgcattcggtatctttgtaggtttacatatggcacagaagctcaggggagctaatagaagcattggctggtcattcaggatctgttaattgtgtgagctggaatccagaaaatccccacatgttagcctcagccagtgatgaccgaacaattagggtatggggcctgaattgtctgcacaacaagtaccaaaatgttcacagcaatggcatccattactgcaatgggggaacttagtatgacaaactcattccaattgatttctcttttttcttatcattgcaattgtgtaaatacgattactattatcacaagtggaccattcatgtcaaacatgcatgtgacttttcatatatatctcataataaatccgtgttccattaatgtcaaactgcgatgggagactgtcttgttttaacaagtatcactgccatacgagggtttgctagaataccttggtgaggatttctagacattggatggtggataaattcaactcaattgtttttgacagaaagaactccttatgattgagtttgggttctctgtttcccgagattcaaatttgcgtttggggttgtatagtaaatacctagcctcaaattggccattgttaatattagagttaggattttattctcatactctcatttctcgtaataattgaaaatacaaattattataatgattaagtttgattcattataaatgaaaaagaaatgttgaaagatttttattttcttaaacaaatccacccaaattaatttcaattacttgaaacttgacataagttttagatttgcggtgttctattagacaaaaagtaaaaagttaagagtaaatgtttttatctaatgtaactattagggtcgtgctcgaaaatatatttaactagtttaaaatgagcatatgaagggaaaaagtaaaagcaattttattattcaaatatgagcatgtgaagtgaaaaagtaaaataatttattattcaaatacgattgactctcattaaaaaaaaatgcgacatgaaaaaacacacgtctattattgatttaaaataaaataaattataaatataattaatttaaaagttttgttaaccagtgttctaataattaaggaataaaaaagtttttaatgtaaaaatgataggaaaacacaacaaaattatgaagagcgcaattttatgttgtccaataaaaaaattatagtcttaattttttatctagcgttcttaaaatattaattaattatttgttttaatttaaaaatagatagatatcctcttatgtttacactttacataagagtctattttagaaaagttagagaattaaatgtaaggatacatgtaaacacgaaaggattaaaattattggactcctaatcaagtgattaaacataaatgattgatatactaaagttaagattgaattatttaagtaatatttaagttcaattcttgatgaaaataactattgatcaaattttagttatcgttggatcaaattttgaattagtcaatatttctttttcttttcttttcttagtgaacaaaggattaataaaaaaaaaacattaacccctcatcagagaaagtttgaaagatttttgtgcatttgaatgaactagggatggttatagctttccatgaacatgtcataacaattttttttggtaaacgaaggaaaagaaacaacaaaaagaaaattacactaaggaaaagcagaagcaaaacagatgctaataagaatccgtgtatttaaattaaaaataacaaacatctaagatactataggatttttttttcttactttaagtgaaaatataaaagtactaatactaaaaaattaaaattaaggcgaaaagagaaaaatttaaaaatgaaaaataaccacttgacatgtatgaaagttaacaactaattattttattttaatatcagatatttagtaaatgagcagtgtctttcaaacacttaactcgtttattccaataaaaaaaattaaaatagttgctaaaagaacaaatacacattttttatttataaatacatataaacaagaaggcatttacctagctttcaaaaagaaaaaaaaaggcatttacctaatatggaaaacaaaaacagataaaatggaacagcggagaaagatacgatatacacgatgacggaaggaaagcacaagtactagctagggcataactttttgtttggatgacggaaggtttttagtgtttttcttccaaagttaaatattgatccctggtgatttttttataatcatattgtcaagtaatatcgagaattttgccaattattaattttcatcaaagaaattaacttgatggagttcttccattctaattaaaattcgaatcgagaacttattaaaaaaatcagaatctaatattacttaaattaataatttgttgattgctaaattaaatattaatattaatctaaggagataatttattttcgataatcttatttcattcacccgaacctggttgaaatgcaaagccttataataatataagtgtataaggtttaaaaatttaacatttaacagagcaaagacaaaagtagaatagcagtagctgcagctgcgcttgttgcatcaagttacccactggggatttgttcaatggaaacgacgacgaagacgaacaacatagggaagaagaaaggagaaccacttttccgtcaaaaccccaaagttgatgaagtcaccaggattcgcatttcccagattctagaacacttccgagcttccaatgatgaaggtatttttcccccccttttttcttcaccatttcatgcacaaaaaacacaactttctcgtcggacgtattatgatttttgcataactatatccattcatgaaatctgggttttgattatttatttatttatttgctgcagtgtacaagtttgatcctggtttgtccaaccaagagcgtgcttgggtgcatcaaatggccctcagaatggggtttagatctagaagttatgggtgagtgttaagggcagcgcatgtaaatttgccacttttagttaaatctgtaagaattattattgtcaaaattcttaaatggaatagttggagatggaatgaatgctttagatttgtgttattgttcatattggacctgtgttttgtgtaggccagggaaggaaaggagagtgtgtgttgaaaaaatgaaaaagaaggttgacacggataacgggtttggaagtcttcctcctttcacattttctggagaggcaaagtgggtgttgggtgatttgtttgctcattatccacccggtgatggaaactcgtgggagatgatcggagaaaatagtgacgacactactactgagggaacaaaacagaggccggatgatattttcagccggccctctatgtccaaagctgaaattgctaggagattggaagctcttgcttctagaatgaacaatgtctctaacttgaaacaggtcctccttctttctctctcctttcaactccagacatgtatgagttttgttggtgaacctacatatatgaattttgttgcttagtgtttgcttcaaaataagggaactgaatattatttcactagcaataaaatggtgcaatggctagtatatatatatagacgaacaaattaggttgtgtcccatcctaatggctgatttattgtcacaaaatgttggagttacatattttatttggagttcatcaagtacaatttcaaccatgataactcacaaaccctttgtccatggatcagaattttgcccctgcactcaaccttgcaactatatttttctttttttgcttctccatgtgaccaaactaccattcaagaacatgcaataccatgaggtggacctttttttatcaatagtggatcctacgtaatctgcatttgtgcacacctccatggacaactttcccacttgtatgattaataggccactcttgaactattcttcaaatactatagaatttcattcattctctataaatgtttctcatgaagatccatagttatcaatcatgtatagcgacatgtagtgcttgtttgctgtgtgtatggcaaatcatttgtctgtgcaaagaatgaaagcaatttgttaatcctgctatatatcagaatgatgttttcttattattcctcttctgccatatatatagaatttgcaaaagaatagtcttgttattgaattatttgtctgatttccattctcgcagatcattgaagggagatctaagcttccaattgcgtctttcaaggattcaattacatcaactgttgaatctcaccaggttaatttaaaattgactttggatatgcatctacttggtagcttgggtgctgatggttgcacatgcactataatttagcttatatgattcacattgatatgctaaatatatcaaataacatggttgagtaagattttagttttagtgcatttcaacatgacaattaaattgaatttgcagattaaatttttgcatgtgttttggtcttaatatttctttcacgtgtttcaaagcaggttgttctcatatctggtgagactggttgtggaaagactacgcaggttacgaattctttgttttgtctttattatggtgcagctacatttacatataatttgtttgtgactgtttcaagatgatcattattaggttgtatgttgatatttttataattggtccatttagtatgtatgcttgtgatatgactctgcacccgtatttaatttttgtattaatgcacttgctctttttacccttaatataaaataattgactcaagctttgatgattgtggacactgataattttttgatgctttgtgattttgggtttcacccatctgtattttcatcattgtatatggaccaaggtcttttagtaatctttctatgctgcaaaacatttatctttctcttttttttaattgtcctgtttaactttatattaaacatgattcaggtcccacaatttattttggatcatatgtggggtaagggagaggtatgtaaaatactttgcactcagcctcggcggatctctgcaacttcaggtgtgtaactctttcggacttgaatttcaatgttccttttttagtcttaattgaaatgtgtttctttcaatgttccttttttagttttaatgtcaatttgtttccttcttccgtttttatgtttagtttccgagagaatcgctagtgagagaggagagactattggagaaaatgtgggatataaggtaattttgtttatgtatctttggtgtagtaatggtactctgatcctttatttgaatttattttgtatagaaatatttatttgaacattgagcattgttatcataatcagactagttttttgcattcgtgtgttacactctcataacacaccatgtttttattgataccgaggaggaaatctataatatatcattagtaatattgcttcaatctacaaatatcttttctattttcccatatcactttctttcttacatagaattatgactttttgcccttcaacattcaatatcctatgttgattatgcaagtcccttcctaagcactggtttccttgcttcttatagtagcatattgctagttttcctagtggtttacatctcatgaacatatgattctgtggcttacattttaaacaaaaaatccagatacggttagaaagcagaggtggaaggcaatcgtcaattgtgctatgtaccactggagtggtattaagggcgcttgtttccaaaggttatcattcgtcaaagatagggcgtgtgaaggatgatatttctggcatcactcacataattatggtacttgtaaattatttttttatctttagctagagcataaactatggtacttaatatttggtaaatactgcttctataccttatttttttgtgttatttggatggttaaaaaattggttatattaggtatgactggtaagttctcagataaagtggttaattgaaaattcaaattgactaggaaaatctgttagaatccgagacattattttttgaaattgttgtaaaattaggagctgtttggtttcagaaaatattttttgttttttacttttaattacaaaattggcacttgttttactttgtttcctattttcaaaagtttgtataggaatctgtgaaaacagaaaataataattggttttcagacgggtctctcctgcaataggtatttgtaatactttgaggggaagtatactttgaaactttcatatagattattatcttagacactttgttgtgttaagtgacaagtgaattcaaatgtcttcatatatcccctcttcatgaatcttggcatatgaggcatttcctgcatatactttccttggaaagtatgccttggcattacgaagcatatcctgtgcatcctttcctcggaaactatgcattgcaaactaaggtgacattcattttttgttcaggatgaaattcatgaaagggatcgatactcagacttcatgttggcaatcatcaggtataccattgaaaggaacctattggcctttactctatagtgtggtatagttaaatacaaatgtataagtgcttgttgcataagtgaggagaacattgtgctgtaggttaagcttgttcgagatattttgcacctattagctttttgggtagagttgagtcgttccttgatgagtgcaaatgccttttttttaaccacaagtatgtggcaataacttcctgttatatttaatcctccctcccaaagaagaaagattatacataagattactggcataagaggtttgtctggtttttggactaatatctctaatttttggtaatttatatgcagagacatgctccctttatatcctcacctacgtctggtcagttcaaacttattacttatatctttttgtctctatttctctgtctcctgttaagtgcttatttaatttataattatgttatttcccatttttaaccttctggtgctctaatattacagatattaatgagtgctaccattgatgctgctagattttctcaatactttgggggctgtccaatcatctgtgttccgggcttcacttatccggtacctatatagtcgtagattgtaaattaaccaatactttgtcacatgttacttactacaattgtctatccaacctttcttcaggtcaaaactttctatttggaggatgttctttctattgtaaaatccaggcatgataatcatcttgatagtaccacatttagtattccaaaaaacacttgtgagctaagagaagaagagaagctttccattgatgaagctattagtttggcttggtctaatgatcagtgggacctgctgttagaattggtttcttcggaaggaaccccagaactatttaattaccaacattctttaactggtcttactccgttaatggtgtttgctggaaaaggtagagtgggtgatatgtgcatgctcttatcttgtggggcagattgctgtttaagggacaaagatggaatgactgcattggagatcactgaaagggaaaaccaaccagaagcagccgaaatattgaagaagcacatgtataatgatttttccaactccatggaagagaagaagttacttgataaatacctggcaacagtcaaccctgaacttgttgatgatgttttgatagagcagctgataagaaaaatatgtattgattcaacagatggagggatccttgtttttcttccaggctgggatgatataaatagaacacgtgagagattgcttgcatcatcttttttcaagaattcctcaatgtttatgctcatatctctgcattcaatggttccaagcatggaacaaaagaaggtttttaggcgcccacctcatggttgtcgcaaaattgtactatcaaccaatattgctgaaacagccatcaccattgatgatatagtgtatgtcatagacaccggacgaatgaaggaaaaaagttacgatgcttataacaatgtgtcaactcttcagtcatcttggatttcaaaagcaagtgctaagcagcgagagggacgtgctggccgttgtcaacctggaatatgctatcatctatattcaagaactcgagcagcttccttgccagattttcagattccggaaattaggagaatgcctattgaggagctttgtctgcaggtattcgatcttccctgattggtgactcagactcttggtgctttttatatactcagtgttaaaatagtaaaaaggttctctggtatcccattagagtgtcaatattaaaagttagaaaatggcagaagttagtaactttgcaatgctatattcaaacttataatttttcatgatctaatttgtgcgatgctgtgtaatgtggttggttattggtttgtgcaaaggaaacaactttcttgtcaggttttgggaagagcaaaggtccttgtgggggattacaagcagggtttcaatggactgattctatatgataatgaaacaagacaataattttcccctcatgttagatttggttcttactctctctcttgtgacaggtaaagttgcatgatccaagttgcaaagtagaagaatttctacgcaagacattagatcctccagattttgagtccatacgcaatgcaattatagttcttcaagatattggggcattttcaaatgatgaaaaactcacccaactaggggagaagcttggttcacttcctgttcacccattaatatgcaggatgcttttttttgctatattgatgaactgccttgatccagctttaactcttgcctgcgcatctgattatagagatccatttacacttccaatgttacctgaagaaaagaagagagcttcagctgccaaatatgagcttgcttctttatatgggggttgtagtgatcagtttgccgtattggctgcatttgaatgctggaataatgcaaagaatatgggtctagaagcacggttttgttctcagtattttgtgtcttcaagcaccatgaatatgttatcaggcatgcgcaggcaactccaagcagaactaattcgacttgggtttattcatgaagacgtttcaggttacagtgtgaatacacatgaccctggtgtgctccatgcagttttggtagcaggtttgtatccaagggttgggagatttcttacaaataaaagtggaaatagggttattgttgaaacaacaagtggagataaagttcgcctgcacaatcattccataaattttaagttgtcattcaagaaaaatttagataacactttaattgtgtatgatgagattactcgcggtgatgggggtatgaacctaaggaactgcacagttgttggaccacttccacttttgctgctttcaacagagattgctgttgccctagcagaagaaaataatgagggggatgaggatgatgcaggaggtagtgaagatgaagctggaagtgaagatgggatggagtttgatgctgagtccagtggaggtcgtgaggataagttgatgtcttctcctgatagtatggttaaagtaatcatggaccgttggctttattttcgttcaacagcaattgatgttgctcagatatactgcttgagagagagattatcagcagcgattttatacaaagtaaataaccaaattttacttgtttagtttttcttgtacttttcacttttgtgatttatccatgtcattcctgttatgacacattggtttacatttttaggtaacacatccaaggaatacacttcctcccatcatggcggcatctgtgcatgctatagcttgtattctgtcttgtgatgggtgcattggtgtgccagcaatgttagaaggtgtggacacactaaccagtatggtcaatgcaacaactttaggcaagccagcaacaggtactaggcgttttggtaagagaccaaaaggatcccttgcagagcttttaaatcacgatgggcgccagacctctgggccttattttaaagcataggaagttcaacaagtgggatcaaccccaaacctgatcctgctttctcacgataatggtcgaaacggaaggttgatgattgtatgttcagttttgaaagaagcttatatagaatacaaatcctaacagtgaaagtgaaacttgcgttcagcttatatagagaacaaatcctgacagtgaaaaattcagtcagaagattgcctttttgttccttgtgcaaacaatgccgtctttttcttggtcggcagatgcgtttgtgccacaactttcaggtgtgtgcgcagtgagatgagatgatggattctggacattagttccctcgcttgtacaaccacatagtaaaatctttgtaaattctagtgtgaacgttttaatatgaagagtagaatgtagaatagttaatgaaatcttttatattataaaatcaaaagaggaatgaaatctctgttacaggctttgagttgatcatgatataatatttagagcgtcagcgataaacatgagattgatgagcatctttcttcatgtaacaagtcaagatttttattatggaaaaattgccctgctagtcagcttgacaaacctaaaatctaaatttatatactttccacattggaactttggaaatgtcagtttttgaacaacgtatcgtgttaatgtctccacaaaaaataagcaaatatgaaaatgatggtcaatagcatccctggatatttgatcacagctgttacgtctttcaattagcctcaaaacagagtttgatatccccactgtgttgaggatatccaatcttttcctatgagcactctgcaccaagattataaatcaaacaaggttatatcagcaacaacacagaaagtgatatcagtacactgctaattattaccagaattattatttaaaaaaatgatctgttatatgtggaatgcactgaactgagaattttaagacagaatagtggtaagaattatttcagttaaaacaaaactggagaaagtgatgagttaagatgtctataatggaacagaccaaaatagaataaaaagaacatcagagagacaggaagctgagatatcataccagcaccattacattgtcattttataaatgcccagatgctgaaacctaactatttaggcaattaccatataaattttcaggaaaaaagaaaccattaaagtataaattttatttcttaactcattgaaacactttttaaagacaacaccgcaaggttcataaagtataaagcaatatttcaatgcagtaattctaacaatacaacaaattatataagttgaaatttggaatatttaattattaatattaactgttaattttttttatataatgaatgataaattgtattatttaatagtatagttttttaatttacacaaccatttaatcataaatatttataaattaaattaaaaataatttttgttggattgataacataaaaactttttttacatgatacctgcctagttattaaaaaaaagtaaattttattttttaattattggtcaagtattagtaaaagtaaaaccaattaattgaaaaaaaaaacagatgcatacacattcgtatttaaaagaacataagacaaacaagcaacataaaacaaacaaagatgaatgatcaaaccaacaccaactcccccattggcatgcagtgttcttgaagctgaagaaagttccagaacacaaatcaacgacgtgcttgatatcggtgcaagatgttattgtcttgtttagggttttaaatcgatataaacaaaaatagtttattgccatgaatatcaaaacacgagtcaacaagaagcttaatttacataaaatgaaaccttcttaccccaaacaaaaatagaagacgcggatagtttgaaactattcataaggacctaatactctacctaatcattcctgaataccatatcagttggtgtgaaaaatacttgataagagtgaagagtgcaattttaataatatcatttaggatcactacacatgcgcgactactttatattgttttggtaaactactctaatatatatggaaccatagcttgtggagttatccctctttacgttccctaaactaagggccttgaattaaaagttaattaacattgctggattgaaagcgatgctagaaatctatgcaatgccgaagtacatgtattatagtcaaaacattaattgtttatgatgacccatttatgttagatctcagaccacatgttacccattttccattctaacattcacacgctatatgtcagagaagatggcaataggtatgaaatgactttatcctgtgattatttattcaattttacaatatttttcctatacgtaagaataaaaattatgtattatatttataataattcatatattatgtatcaattaaattatattttcttgatatatttagtgataaatagatgcacttagggttgtacggggacaatttccccccaaaacaacttttattttacttaaacatctttaattaaaaaataatttgctcccataaagaaacataagacaattgtttttaaaatgaaggtaaaaagttataacaaaaaaaaaataaaaataatacattgttaagtgtagaaaatagttcttgagaggcattttaaattcttttgtcacgagattatgtattttgtaaaaaattataatattttttgaaaaattaattattaactatttttttgttttcactaaacaaatcctccgctggatgtactcaatcttgccataaatattcatctaaaatctatgcctacattataaactaaatctttaatttaaagagtaacattttcattcttttaattaaatatttttaataatttcatttttcttttatttggacatacatttcatattactctgatgattagttaaaaattattctctaccccatattaaactactctatacatgaccttcttagtagtcctttactttcaatttattctcttttatcatcatctctattctctaaattaaatatattaatattttaaaaattgtccatagttataaataatcttatatgaaaatttaaatggtatattataaatgaaaatataatttatatatttaaagatatttatttattaatttttatatattaaaattatctcttcattatataatttttaattatatcaaaattatatatcatgtataatacactgattaaagtactactttataaaatattgtaaattccttcaattttttttttgtaaatcgtcactttttaagttgtttttcttttattgtttattagttgaataagaagcactgtgcctctatctttatttaaaaaaaagaaaaaacaaaaaaaagtagttaaaaaaagtagtagtaatggtttttttaggagaaattgtagcagttacatttatgaaaaaataaaaacagttaaatatattaaaggataatttataaataagaaatatgtacatcaaagggataattgtgttgatatatatatatatatatatatatatatatatatatatatattcattctaaagaagtaaatttctcataaataaatttttatgaaataatttgacataaatgattaatgtgttaaaattaaggttgaattatttgaatagtacttgactttgatttttaacaaaaataattattaattatatttttttacattttgatcgaattttgaatggttattttccttgataaattagaagttaagataacaaatttctcataaataggaaaataaaatttctaccccgaagtcctttcaataaataagaagattacttaataaccaatttaagcatattaattgattatattaaattccaattaatgagaagttggatacggctcttaatcttttggataagaaaacaaaattttagatgaggataattcctttgcaaaacttaatgtgtatatccctgaaattgaaactgtagaaacctcatgtagatgactatagatttaattagaaactcgaaagaatatagtattgcatagtttggtttaaaaaaatatttaaagaaatgctgtctcaccgatgtcagtatactcggcataatttttcttgtaaaattgtgattaattagttgatgtaaaattgaaaagataagaaaagtttttatatatttattttaagttttgcaaaattattttcaggagtgtgaacttgaaaatatagcatgatttacaacttttattttatgtccaaaccttcataacatgattttcaaatttttactagctagcaattaattgtaatattaatggttctgcaatttattcacgacagtacaaattaaacgaaatattcatggaactgaagtagtttaatgaggaagttgaaaaatggtagctcatggtagctagggaccgatcgatatcatgaattcgcggaaatggagccataagaaacacaaaatcaaataatggctatcagatttaagaattaagattccatttgactgaacagcaatgaaagtccgtggtagtacataattacatatcaattatcaacattgtcgtttaacaaaattcatagactatctttgttactttctcaaccgaaaacgaaaggagcgacatcattattctattggtccattcgtgttgattgtttagctgattttcgtttggatatgaacttataaaaaccatgatatatattcctagctagaacattaagagtctgttccgtaaagtagaaaaaaaattaattaaaataatttttttgaattaaagtataacctaaaaatataggtttgatcatattttattatttatttcacttcttcattctctttctttgaaatcgagcgaacctgaggaacataagtggtgtgaatgaagaaagcgtattgttgcatgcactatttctaagatttgacgtgcatgggattgttgaactgggaccacctgagtttaatcaaaagggctgttatgttcaaagcatcatgggaatataaaaccacgtgatggtgatctatgacggtccatattatgccatggacggagattcagaggaacgtgtggtcccatatatcgtaaaccttttaaggaaattcttaattgcagttctagattctcttttcatgatgtttgaattttgaggaaagagtagtgttgataagcacggcataacgaagacagagatgggtccaaaagtaggcaccgtcgatctattattgacatgaaattggttggccacagagaattgaagatttaattggaagacatttttcctccctctattaacaactataagttatttataacttcttttttggcaaaatcatttaaaattttattgacaatgtgtagcataatacataattagtgtacatgttttttgtttttgttttgggcggatggtaatcaaacactattaagtataaattaaactctatttttacgaacatattgcattattaaatatcttaattaaaatgttatgtcggtcgatcatgaaacatgacattgacacgacttggccaatcatatagaccacctaacattgggacaacgtaagccgtgaacaacagccatagcctttgtgtttgttttaacactataaattaacatttaatgcatgaattaatattgtgattgtttttcttttcttgtgcatacttttttttggtatgtttgttataaaagtagaaagaaaatgaaaggaagaggaaattcatccatgcaagtttggcagtttagtaatatattgaagaatttgtgatgatacaataggttattccccccttttgattattttgatggagagacaagttaaggaaagcaaggtacgtaattcccacgccaagcagcatcacatatttccatttggggaataaaatgatgtaccttttcatttgagatgtgtttttgtgtattataagtggatgcaaaaaacataaaaaggtacgtgggagaaaaataattatgattaatgtatgtggtatatatgacatatatatctcaatttttagatgctcaaataatattactcttctcgccttttcattgttttttaataaaatcaaacaaaggaggataaaaataatctcttataacatgaatttgtgtctacgaaaataaagcattttttcgaatttctattaattaaatttaaataatgatgtgttttttttaatattatgtggcacgtgttttaaaaaattgatctatattaaatcaaatcaatgtttttttttttgctttaattaactattcaatcaaataaaagttacttttatcattttataattggtacttaacttttttaaacaacattaagtagaataacattttataaatttttaataaaataatatcgtattaattaaaatatattttaagttttttcaaaacttaaaattaaaagaatgtaaatagatgagtcgatactatataaaagttaaaaagaaacttattaaggtttaaatttgaaaaagaaatcttagcataaaagaaaattaatatgaatatcctataattaatttatgttgaaaaataaatacagtactgaattagatttataatatagggacgggttatttttaaatctcattttatcataattaacattgtcttaattcagataataagatctacatatgcttaactttcttattttacataattgatttttgtttttcaactcatgttttgaaaactacaataaagaaatgtgaaaggaacaattgctgtcggtgaatgccaatattttcggatcaataatgctatgaaaagaaacgtattaacgagtttgtacccaccaaaaaaagaaatgaacctaccaaaaaatattaacaaatatttaaagatactaaaatttataaataaataatttttattaaaattatgatagaattacattaaaaatgaccactaggatatgtagttgagacctttttagtttaattttaacagattgttattaatgtacattttttataaattttaaattaattattataaaattaataatttttatttatatgataattcctaattagattgttagtatattatatttaaattcatattttttataaaaaattatttttaactttttaatcaatgctttgaaaatatttagttagtacttttcttctattaaataggaactgtgtgaaacgcgtcattggacgaatctaacaaatatcatctttttaaaacacattccatcttttgtatactgtcaattttaaatggaatgatcgattggagaacaaaagcgattttttttctttgaaaaatagacaaaaagaatttatgtgcaatatacgcttcagcttttaagaatccattatttaattcaatttcttgaaaagtcattggccttggacttttggaggttgctgcagcattcatattgaaatgttgtatataggtgagaccagtcttattattcgcgttgaggttcactatagctatacataattacatatcacatatgtaacagtgtgaagcacagaaaaatgattaaaagcagtgtaagaaaatacaacaaatctgaacttccacgcctgcggtggacacctgaacttcatcaacactttgttgaagctattgaaagtttaggtggaaaacaaagtaagtttaatttccttcatgtaaacaaatatataagatatttataattctagctagggtttatagcaaattatatgtatagtatattaagcatatcccaaaatcagttaatgaaagcatatgttattggatacaaaagtccgtttgatcgaaggaagccagtaatgttgatgatttcgatcaaattctttcattttgatttcttctgatccaaccttagaattgtccttgactccttaactttaatgctttgttgactgacaattttttgcatgtctgagtttcatttctagatttctttgagtttgcttgtttatcttctaattcttattgcataccacaatatctgagaagagaaaaattaacgtgtttgcaatataatttataatagcacatatctatgacatgtatatagcagaaaattattggttcataatatatatccatagatgaagcatacgttcgtttcctctcttctcttctctagccttgtgtgtgtgtttgaaatatcaaatcaaattaaggtgggaaggaaaggaactgtttgtgaattgggatgcttaattaagctgcaaatgtataaatccagcaaaatggttttgcagaggcaactccaaagcgaattttgcagcagatgcgtgtgaaaggattgagaatcgctcacatcaaaagccatcttcaggtatgcatgtaagcatatatatatatatatatatatatatatatatatatatatatatcttactcgtgtggtccaaatcttattattattttttgtgaatggaaactcagcatgatcatctgaggaggaagatttaattaatatacgtatagtagctaatttagcaccaatttctttcatcacttaacagtactagtaaaatagttctaaaacgtgcagagattattatgtaattaaaatatgatttaaatacattttcttttcttttcaatgtagtaatttttttttattgtaaaattatttttgtacttttaatccttataaattatattcattttattttagtccttaaaactctttagatatataacattttgaagaataaaaaagtattatctaaaatgtcatgaagataaaaaataaaacaaacataatcttaaaaattaaaaattaaaaaataattttataaaactaaaactaaaaaatactaaattataaagattaaaaaatatttaagtcttaaaaatatttctgatatgataataggatagtattgtcatagaaagtccgtatagatttattaattctccgtttttagtcctaaggtcacatctctcttccatctatattaaatgggaaaataaataacaaagacctagctaatacattggtaattagtaattattgcttaaaagcaaaacaacaaagcagatagagccttctttcaaaaagatcataattgatggagaacatgataataagtcactgcacagtgaactatatagtagtatataacaatacaaacatctatatacaattaactatctaggttagttacatatttttttattcataaaaattaaaaacagtaaaaaaattataataatttgtgatcttgtttaattaaccaagaatatttaggtacacatgctccacgaagagggaagatttaaagaaaaagaagatttttgtttcattgagtaacaatatcaaagcagccaaatatgcagctctatacagctgtcaaattaattcaattctctctctcatcttgacaacaatgcaaaaacgcatgcacaatgtgtgttccaatattcaaatcatacttggttttaatcatcatcatcatcatcatcatcatcatcatcatcatcatcatcatcatcatcatcaagaagcaacctagataagctcagagccattaggctggctactcatattttgtggtttttatacagtatcctgttaattattttagaagtaagaaattaagtagatccagagtaaagtcagaaattaaagcagaaatttgttttaagaatatttttttatacccaaatactgagatcaaacacaagaccactgctggggaattataatgttatttacgtgcgtgtgtatatatatatacacacattatttatttcctttcttctattaattaatttttgaattagtatatataattcatgattgagttttcctacatccatccaaagagaaattttgcgttttattagatgtacagaaacaggaaaggacatgccattattgcaccagtggatcagttgctggtaggaaaggcaaacgatttcaaaatatgctctatttctccaaccgaaaggtaacccattactgatttttcaaaggatattgggttaagatgtctttgattagctatggataaaagaactaaaaaaaatatgtatcccattatctgaaaaaaagattgtttctagattcgaattcataatcaacaagttatcaagacataactttatagttacagttgtgtttgattaattatgaatataatcaaaatattttttttaggatttggacaatattttcttattctgaactacttttcaatttttttgtctaatatggtattcaagtctcatggttggatcactatctatttcaacaagcttcattaatgattatgtatatggtctgacactactcaaattttattaattcctttttcttttgttatatatataccggttaagttataataactgttttaggcatgagagaagtatagttagatatctcacaataattaaaaaagtggttaatatacttctcataaaacttaagcaaataatgctccattgattgatggaattagcttttgaaaatgaattaggttatatatactatttttttataacttcagccattataaaaaaatgtcatttgaatatgttacatcatgaagtactacattttactattatcactttatgaatcagttattttatcacatttttatttaccttttgcatactcttttaatatgctcatcaaatcgataggaagctgggaacaacttttaatatttttttaatatatatatatatatatatatatatatatatatatataagaactgctttatgactatgaaattatgtaaacaggattctgaagcgggaagaaactgattatgatctaaaccaggtactattttaaactaatattgatatcacttggcgtctccccaatttgttttgcgacttttcattgatcatcttatgttgtaaaagcatgaaacgcaatgtttcaaattaaaacctatgttcttgtcttgatgacaatttagtaattgaattgatgcttctagtcgctgaaatatctctgcaaaaatatacacatactttaaacttttttttttgtcggtattaaaagttgaatattaaacattcccgcacacataaacacttcgtcacaagtcaatttttttattaattagacttctattattaatggttttataattaaattacacatttttttagcatacgaactctcggaaagaagaaaatgtccatgtagtttatattccatgcgttgcacttacaaaatttcaaattaagaacttagcttacttcaaattaattgttagatggggcaggtggaatggtttttgcttggcacataaaattttagtcccaattaacgtagaaaataaagactaactttaatttatatgttttttttgcaacaaaatgcttttttatatgtttatttgagacataagaaagtaaatattgaatatagcgttttaaatttaacatatcaaagcggaaaatacgctttgtatacaaatattgcatgatctaactaataattacattctttattcttgattaaataaacgaatttgaatacagcgtattaaatttaacatttttattataaagaaaaaaaagaagaagagagaagaatataaatgttcattacatgttattcacagatatattttttgttcaaaatatatatattctggaaccttgcaggaatcagagtcaagtggactcttgcttagtgatgatgtgtcaaatgaagaagaaaattttgctgatctatctttctccttcagcacgcctctaatgtccattatgcaaagtgagaatagcaaagagataatgcgtttttcgtcatcaactgcagctgctaatcattccgttgattctatttctacgccgtcttttgcaaacaattacataaacttagacctaacaatctgaatatgcgtattaattctttttatttacttacacgtgcgtaacactagttttaattacatgttaactttttaggcaaggacttacaattaatagttagttaattagtgtactttattacagtgttaggcttgttaggcgtaataaaaggttctctttctttttccgtaacaataatgatacaagaatttaaaccatgcttattaattaatggaaattaaaatctaacggtgatgatcgatcaagttgagttggagcaactttctacttatgattgatcacttgcatatagtttaatgaaaatatcatattaattatgcatcttttcagattcaatcacattatatgcatctttactgtaaacaactcagcaccatcatgatcatatgaataacctttcacacatgtcttattcttaaagaaaacagcataattcttttctaggagttatcacacgcagattgtggtgaatttcaatcctagacaacacatttgaaattaatgatactttgaccaagtatcaattgtagcaactcctttacctttttaccttatcaataaagcctccgtctgcaattttaattataatttcttttaactaattatccagatctctaaatcaattatatgccttcatggaaggtcatgtgatgagtataatcaccatcaatcataactccgtgcttattattggctagctatagaacaaccaattccacaagcaaaggattttctttttgttgtgctatggggttagaatattagttgataaagtggaacgttgtattctcttgttcaataatttcctaaaatagaatcaagataaacttccatcgatcgatctagctataataacccacatacacatgataatgttattctcattttataaaatatcagaaattgtaaaagcttaaaatcattttgaacagattataaatttgtgataagtacatcttccatggaaaagaaagttaattagttagcaagctggacgaagtccagtcgtctccacactctccagtactttatctggtttgtgattatacttaaacgataaatgttattatctatatatgtatagtcatattggacttgagcatatggtctctacaatttacattgtaaatacatatataatttttaatttagcctataaatataaatataatttttattagacatacaatttttttattaaacttatgatttttatatataaaaaaatactttaattattatatcaaaattaattattacaaaatttattatgtaaacttatacgtgtattaaatatacattaaaaattttaatattatatgtatcaacattaattgatttttagcataattgacctattatgtcagttggttggagtgtcacgttaatcatatgtttgaagcatgtaataaaacaaagatatttttaaaaatgcattgtattggaatgatgtattagtttttgttgagtgtataaagtttttccaaaaaaaaaaaaaggctacatatggtctttgtagcctcttttcaacccaaatctgatatccccaatgttgatcttatatctttgtagagccatagcaaccaaaaactcggttaatagtgatctttgatgatacctcccataccaatgaaaccagttgaaaggcaaagtgattatttttatgtctaacatttcaaaaatattctagcttgtatatatgttggacacgtgcaggaaaaaaaaagggtataacgatcctttggattgcatactgtttgaacttgtctccatttaatcaatgttaaattgttcaaccatacatttataacatgattcaacccatcacatttaactagtaatttcagcgtgtgaatggtacaagataataatcaaaattaatactaaataaatattttttaatatataaattatattttaaatttataataaattatttaaatttaaatttaaatataaattatattacattattgacaatttctaaaaaattaatttaggaatgaaaataaaagaaaatagattgaaaatgataaatagttaagaaattaagtatgcaaataaaaataaaagaaaggaagtttaagataatggagagaaatttttgagtaattatagagataataagtgaaatacacttttttaattgtgtatttttatttataatataaaaataaactatgtaagtcacaacgttataatgctagctatctaaaccactaaggcccgtatattgaaacttaaaaaataaatagtaattttaaaattctgtataaagtagtttatttttaaaatcttgatgtaacattttaaaaaaataattataaaatatattttattgattataattttttgaaaagaaaaactttgacaaacatattaaaattttatataagtaatttcttttcaaattaaaagcaattttttcatgaaaaaaaactgacccatgcagatataaaataaaacttataaaagtatgtaattcataattgaaataattgtttaaatcaggcgtattaactccgaaagccattccttcaaatgaaatttcatttatcaagatacatttcataaaatcaggtgtaaacttcatttaaaaaaaaaacattttattgctccttagaaaaacaatcgaacgtcttcctgctcctaaatcctaattatgctagatattatagttatccattagtcctctataagctaaacttcactcacctttaaaaagtaatcttttttgataaaatcgatggattaggattaaatttttttccttaagagggagaaagaggccaagtgtacttatttggatagttattatccatcaatgcatggtacacttgctagttgctaccacatataatacttcatttcctcggcaaaccagaaattaaataccgtggtgtccatgatcttgttatatatcacatgaagattgaccaaaaattcccgaatcatatgataatttctcctgccaaacaaatggaacgaaatactttaaaattaaactaataaatgtacattaataggaagaaaaaaaaaaaggcagaatgaacatctttgtacaagttcggatccacagggaatccaaacactttcaatggtttctgttctgttacatctttcactacacatcattgacccgtatatcatttttctaaaataatatcactgagcagaattttcactgcctcttcgccaacgtcttccgcaaccctttgataatttttgaaaaccaaatcaagttcataactgatagcgccagcggcacaacaataactaacacttgtccaaacgcgtgcatctgctcaatctgttgaatgaataattgaacaatgacgtgagatcctaagctttataaagtagactttgcttgaccagaaattagaaagaaataaaccatttttaagattcccatgcaagactaaagtctaaaacatttattacaaaatgaagacattacacattctccttgactatgcacgtaaaatgcaacagtcgttattaacaactctcatacctcacaataaaccactccctatccctatcacatccaggtgtatttttaacaatcttctgagatgaatatttcatgactaactagttgacatgatagatctactatgacaacattcgtctaagcaaacaaggagtcaaattgtaaatttattggaacaagttctaccaattcagtcttattatgtagaggtaatgctatgtaagtatatacatgcgtaaatggacagagactaccacactaaggaagagtttggttgtgtggaatggaagggaaggggagaattgagaagaaatatttaaaattaaagtagtgtagaaaaggtgtgggacccacacaaaattttaaaaatttcttcacaatttgaacataaccaaaccaagggaattgctgatccatgcacccaaacacacatacatgcaagttcaaaaagtgatcttgttggcaacaaatacatccaatagaagggcaacaaaacattattagccatcttaaaaggccaaaaattcaatattaagatctgcttgctgcaaagcaccacataccagacaattcttaaattcagtcagtagttattacctggtcaaagtgcaggtagacatggtaacacatgtaaacaaacaaaagtattctggcaacctgcaggaagaccatttcagttagcatgtccaagatggcacggatgagattgctatatacttaatatgatatgcaattcacaatgattccacaaataacaccataaatgagtgacaatatatttcaaactgcaatgacttaacccaccagccaagcaatgaatatcacaaccccattgatgagataagcttttgacttcttcattccagctgcatcaagataccttcacaaacacagtatgtgcattagtaaataaattacatgacatatatagtgcacatttaggtgcaagattaccatctcaagttgatcccaggagttgttgtctcagagatcaggaccatgtatgtgtatagctgaccctccccgctcaacattgaaaacgctactgctactaaagaaagcaaatgatgaatcacctgaatcaatgttaatatgaagtcatgttaaattcatatttacaaccaaatagggtgaaaaaggaaggaaaccaaactcttgccataatcaagtggaatatcttaaaattgattaagagagttcagatgatcaaggttagattggtttaaactatgcaagtcaaaagatatgatccttacatactcatatccaccaagagaaggaaaaaaccaaaatatcatcccaaggtcagcgatgaagtaaccgacagacacctgtcacattaaaaattaaaacataatacaaatttcatgaccagataaaaacaaaaatgtgttgcagctcataatatgatgatcgataaacgtaagatatatactttttgttatcattggatgtatcagtaaaatcaagggaataacaagtccaaatttgttgtaaatcatgactagcaacatatagaagaggtactaaaaggaaattagcagaagatatagatactaagaaaaatgagaagagtgatttagttaatataagatgtcaataatatttgttaacatgctcagacaatatggctacacacacataaagaaatgatgataaattggtaacatttcagtctaacttattcaatctagggtccaaccaatgccaattgcattaatcacacactctggatcaacatatggttcacgctaataaaaaattgtcatttatgtactttaattatcaaatagattacattactctaggaagtatgcaggtctgaagagcaattgcagaacgctttaaagttaaaaaagtggacaatgtaaaacatacgggaatctatttatcttgcttttctttcttaagcaaatctttcagaagaaaaaacaaattatgaaaatcaagcagcaagttaaaggcagctgaaggcaaatagcatttcatcactagtatcctactgatcaagtcttgggtgtttgcattgatcattatacaaaaaaccttcctagtagtggcttcttctaagaaacattcgtaataccttaaatctccatgctggattccattcatggactacaaaagacaatcctctacttcatggaagttaacattacctacttgcttatcgtatatacttactcatcaacaattttcataaaatatttttttcttttaccctggcagcctatgatttcatctaggtctgtcttgctttcataacaaggcatgggtgttctccaaatttaacttccagtatatctagggattcagactcaacttacaatatctccatcataaaaatgtcaaaccatgaaaagcccaccaaaatctccaaaataatcttatgtatattatctcgtactttttggaactccactacatcatggcattcacgacaatatcagaaaatatatatggcaaaaagtcagtgatcaagatgatgctaataatatctaaccccacttggcagagtcatagattaaaataaaaatgaactccatgattcatcccttcattctattggttaggtgactagatttattgacatgtcctccgcagtgaagtgagacaattatttgtgattattcattattgtttatcataatggtgacctgcagagataaatcacaaagaggaagaaaagggaaacaaattgtaaagggtccacatcattcttacccccagagcaaaggtagatgatgaagagcttcgaaatgtaataagttctgacgactggttgtcagaatatagatttgagcaaaacaccaagtacaacgatatagttgttatgaaaatagaatgaattgttgacatagaactgcacaaataataggaaaaaaattgtaaacatattatcttgtcagaaacaaattaagaaacattccaccaaatgaaaacatcccctcaccgattattccactcaacacgttggattctagtgaggctggaatagctcttaaagtgaacagtgctaaaaagctgagtaagatcatagacctggaaaaacaggaaatatttagagataattgtaaaataaaaataataaatagcagtaatcttaaaagctcctaagtcaggtgaaatactttagaaaatagaatgaggataaaatttaatacaacataccatcttgcaagcaaaaataccaccaataatagaagtatatggaatcagagggtctgctaacaaatattccttcacgaacaaattagcccggttctggtaggatttgaatttcatcatttctttagaagctaacattgcaataccaccccttaaatgagaaatcctttgaagattttacaacctttctgcctttacacttgtctcctgttatatgaataaatacaagtttgaagacaagatattcaaaaactaaaagccaaagatgaatccttatttggtttctctatgacaatgacttatgagttaaggataacaataattatcaaagaagttacattaattgagggaaagagacttaacatattaagtatatgtctattgtgtgccaaagagacaaggacatcagataattaatcaaaactttcttatggagaagccagaatgttcatatataaggaaagaagaaatacaaggaatttggaggatagggtatcctccttgcagaaaaggatagtccacatcctaaattaaatagatctgctaatatttctcattcaaagcaatcttatgccaaatcatctctaaaaaggtaagaacatccaacagaaaattcaaatattcagcatccaacaaagacaccaaaaagtttgttcgcatacaagtcgaattgccataacactcttcctctttactccatccaaaacctctgaaatcaattaacaagacaagaaatgcttcatatcctgtgcacatacatacccaagtttcacccaaaggtcgattccaacttccaaatgttgctatccagcaatgttaataacaactaacaacactaccgcagatccaccaaccaaaccaacatatgctaaattcaattattaatacttacagggaataaattatcaatccgtagagggtaagagaaaaatgatataccaattcgctttagacctaaatatcagtaataaaaaatttatccattaatatcaagcctaaccagttaccactccagaaaatcaaataagttactactaagattaatgtgaagctgacaaaagacagtaaaaaataataaaaaaatgggggaaaatcttaaatcatttaagaattgaagttcaccaaatgcaattcaaatagggctctaattttccacaccaaaccagcacccaaccaagttcatataatcgcaaccacttgacttgatcaagtgggattgaaatccttgcggatcttcaaagcaccaactatttgtacttctcccacacagagaactcattggcgtaagttcagggacagcaacaaacaaaaaaattacaccaaacttcaagagtaaaatctcttcacgaactaaaaaaaaaaaaaaaaaatacgaatcgttaaagctttagcagcagtcgagacaaaaaggaaggaagtgaagtaccgaggaagggcgaataggcgtgagtttggcgaagggaagaatgcgatcggttgggtggtgagtgcgtttgtaaggaaatttggagttgaaagtggtgaaggtggtgggatcatgctgcatgagttatgttgattgaagaaatgggaaggggaaatttgaacactgaaaaccctaacatgtttggattggattgggattgggattggaagaggtgaggctaaggaggaagatggcagataggaagaaatatggttggcaccccgcgtcttttatacactttctcaattcttcttcctttttttttttttttaaaataaataaaaaatgaaaaagaaaaatagttccactcccactcgtagctaactcagtattcaatcgctttcatcaatcattttcaattattacgtgtcaaatatggagtagatcttttttaaattaaattaaatctatctcatttattgtgttgggtactgggttccaatttcatgtttctagcttgtgtttatcggtgttgtataaaatttagtcacttatcaggaatttaattaacttaataaaataaaatgcatgaattatattataattttttttactactctttattattcttacagataaaaaaattacaaataattattaatataacttttaaataaaagttcactaaaatgatgatgaataattactttatgttagtgtataatttattttttcttctagtaatttttaacgaataaaaatgtttttgaaattctgaaaattcgataattggctgattatttatttaatgaagaaaatgttaaatttttttatatttttgaggtgttaaatacatttattttttaatgaaatgttgggataattaacaagaagatactgtgtacactgtacaacattagtcttatttataatagggatggtttggagatattttcaatttaaaattaaaattaaaaatggcagattcggtttaaagatttttcaagtttagtatcaacttaaattaagaagtcagttctcaattttgcgagcttaggttctttgattaattgaataaacagacaactactgatatgttttcaggtactataagaattatttatagacgaaaactttcaatttaataaggctaactacttaattcaatttcatttaatgtatttaatgttctcctaaaaaaattcattttgcacattttttttggcatttataaaacgttgtttatatggcattttatcatgaactaacaaatgctaacatgcccaagtaaagcattggttgggtgaattcagagtatttccagttccagcataaagttaataactaataatttaagatattggaatttatttaaaatattaacaagagttagtaattaatcttttaagatactagatttattaaaaattgaattgtttcaatagatctttttttattgcttgagagatgtcttttatacacacaaacatggaattcttaaacatatacctaaggaacatgattatatgtcaactatgtcatatgtaaataaaaaaaacattgattattaggtaaacaaaagcataaaacattttattaaaaaatatttattttaattaaaaaataaaattattttattattttacttgtagtgacttagcaagtaaaatttcaaatctattcctttataatacatttttcacaaatataaaatcaatttaaaatttgaagcatttatttacgtataaagataatatcactattcagtaaccgttgttgaacttgaaagtgagatatgtgtgattgaaactaaaaaacgagagttatgctgcattggttaagggggtgttgagtgtttgagtgcagaaaactcttggaagttgcggaaaatggggaaatctgttgttggaagaaaacgagggttgtgaggggacaagagttaatttcatgcttcctaggtcacaaaacgtcgtgctcaagcaaggtatgtgctatatacaatataaatcgattaccttatcatgacaattgccttatcatgtgaaccaaggaataatgatgttcatggtaattaagactacatgtcgtaaaaaaaaacccgctcatgtcacgctttttattattattattattattattattattattattattattattattattattattactactattattatgtgtacacaaagttttcatgaatcaagttaatttcacgttgaaattgtaaagtcaccattctgtatatatgtgataaaaatgaaagtttcaaatctgcacttagacttagtggaaaaaattggtgttataaacaacagtctgtgatactagcatccaaatcattagtgtacataaccaacattaattaaacaaggttttttcctatttggaacttggggagcatatagtcttatatgttcctcttaatgatatatgaaggatgagtattagagaaaaaatagttttagatcattcatttatttttatttttatttttctatcacatcataaatcttataatatttatattttttttctttccagatgtcttatagcatagtatcaatgaaacatttttctttactatataacaacagatctaatacagataacattcccattaataattaataactaataataataaagataaaactgacacaaggtacatagtccatagaaataaaacgtctaaacctaaattgaaacaataacttattcaatgattcttcattagtcaaggcagagagaacatataaggtattgtttcaatttggtagcatagctaaatagtaaggtaaacttgaacatcataattatataccagaagtgcttaattaaatgctaacacaatgcaatgaaatttgatttgatggaaatatactccagttattggtcccctccacatgctttagcaagcaacagagtatgcttgcaaacaacaacttcgaacattgaaaaagagatttcttgagatcagttccacttcttgcaggcctctaatctggattccccacatagctctcttttcaaattgataagcacatggataacaaagacaaaagatgcatctccttagccaatttgacattttcctcaaattttgaatttttcttaaatgggaacccagatggaagctggaggcactaggcacaccaaagtctctcaaaacattaatgttaggggccaaattatctataacattaccatcacattaacaattttgactttaacaaagtaagagacaatggcatatttcgaagtttaaactttagaatacaaatacttcccccaacaacagactaaacagcacaagtaggtattcatcactctgcattctattagctgtctgccttataccaacaaaacaaaaattatgatttatctatggcatcagataaaatattgtgctatagcacaaaaaagaaactgtattatatcaacctacactagtatagtacacgtgctttaacacgtcatgtttgttgttatgaacatttgaaaaacactcatatatacttaaagttatatactaatccaacagcaaaagtggtggtggataattgaaatattagaagcaacaaattataaccgtgaaaaaataatcaatgtagcatcaacacaaatatatccaacatacacttaatcgaaggctcactacatgaataataaaataggaagaatgctatgggaataagtttcatatataccaaaaaatgctacaactaattgattaattgaatgtgtaaatattactcataaaaataatgactagtatattacacacataaagtgtacaagtcctgcaaacaataaaataaatatatattaaattccaattacatatattttcaaacaagagtaaatattaatgaacttattttgtgtaatcattgtgtttataaacataaagttttactaacaaaacctttgaattcatcatttttattcaatatatgaagtttataaaaatcatgaaaattaaaaactgatcaacattttattaaaattttacttttatgtataatattttgaaaataaatattaaatatgaaattatattgatataagtgtttcattttttaaaatttaatatatattttcatcaaaacaatatcctgcaatttaactattaaattcacatttgtttgaaaaaactattatgtttagtaaaattctgttttaaacacctatcacatacttcatctagtactcgttattagaaggttcaaattaaaaaatatagcttcattttttttataaggtgcaatctgaaatttttggtgaattaattatttttttacaaaaatatcttctattaaagtccgttctaaaacgacatggtatggagagaaacacaattcattaatgtgtgttagttttgttcaaaagaataattgtatgagaaaagatagtattttaagacaaatttaacgctcttatataggtaatttaatcaaattacttaatctgataaattggttatttgaactttataataatgacagaagcattaagaaaataagaaagtgaaataagttgaatttttttgcataatataaaacaaattatacaattatattttataaagaaaatattttacttagtttctttcaaagatggaatgcataaattaattttaaaagagaaaacttgatttattttataaatatttaagagagatgttcactttaggaattaggaggttaaatagtaattatattaaagggagatgctaatcagtattattaagataatagttaaagaaaagaaagattttttattgacatacgtaaaattatattaatcataatttttttacacttgtatatgatttttataataaatatcttattcatttagttatttgatgaatttgttatggacaataattattagaagtatacttagcaagtgaatcccttgtgaatgaggaaaaaatcagaaattctagaacattaccagcagtgatgagaatagaaggataagcatccaaatatcgaattggtgtgtggtgtgtggtgtgtggtgtggtgcggctctttgaaggaagaaaatggcaaaattagagtcagcagtgataatagcgatggcagcggaaaaagcacgttgccaaagtccattgcctcatctcttcgaatccctcgacagagcttttgaataaaagttataagtgattttgggaatttttttattaaaaatataaaattttttcaatagataaatcttcaaaagcacttctactctaaactcacccgcctcactcctcaacgatctctcatacgacgccatctgccaaatcgcctccacgcagctccgcctcggcctcagcgccctcctcgactctccgctcctccgtacaagccggggacgtgggaggaactggagaagcttctggaagggtacggagggtgtacggagtacgacgttggtgacgtgccaaagctcgtcgtggatacaaccgccattgtccccttggaagagacgtgttccgctgcgttggagtttatcttcgctcacgctgctaagccaactgcgatttagccacgtggcttttcatcgttcgttctgataatatcttctttcttctaagatcgctggtagcataaataggataggattgtaaacattataaaaaaaaaaactattgaaattctacttgttaaatatatactccgttttagtatttgtttatttaattaaaaacaaaaatagcttttaatctctacaaagatatctattatctaataatcacttggttcttataaacaaaaggattttgtaaactatttgataggaaagaagcaaaaagataaaaaaagaaccttattttctcttccttaaaaagataaatattcgtaataaagaaagtaaatataaaagtaaaaaaaaaaatagttttcatttttttcctcatttctctctcccaaccaaaatggacagattactataacagtgaatttcacattctttttattcatcctttcccaccctcaataccaaacaaaagaacaattgaaattaatgtcttctttcatcatactcgtatttgtttcgctggttctcacttgtatcaaacaaataataataagattgaacctaatctttatgcatctattccaatttctaccattaacttaactgtttatttatatgtgatgaatttataagaactcatatatatactacgtattttaaaaccttaactattcattcaaggaataaagtattaagatttttaagttatcaaaatattaaatgttcttttaattgtttcaaatgataattaagaaaacttcaggatgatgcaccatttcttttttatttttcagaaaaatctataccaaccaccttagtggcatgaaatgtgacagcagcgacaggaaatttaatgaaaaataaataagtactttatgctttacataaatggttataaacgttggagaggtataaaaaatgaacaaaacaatatacataaaaatcgaaatttagaaattatctcaattttaagaaccaagaattgagttcaagccttcaaggattctccaacatgtgtgtgtatatatatgtttgacatatgtttagattttgtacgatcaataatgattaaatattgtaaaaaaaaaaaaaaaaaaaagcaaatgtgaaaactgaaaccaccccctcctagaatttgatacccctaaattccaatcgaacaacgatgctatctgcacgtaattaaatgtgctccttgtgttggagaatctgcaatttttcaatattcctttttgaaattgttattagcaatttagcacgttcattttaggatgttctggaacgtagaactgcactgaaaatctgaaatccttatccaaaacaaacaaatttacgttggaccaacttgctttcagaaagctgatgatacctacattactgtactctgtagcagtaactaaagtttttactatccctttagcagagcgaattcctattttggccaatacaaatatttcaatattctatcgcatctttttttccaaactttgtttctataatttcacactctcataactcggaatatagcaccatttgccgaaaagagaaaaagataaatgcggttaatgtgcatcctaatcctttgcgttttgtataagttacagttgcaatgcattaggaaattggtataaaaaaaaaaaaaaaactatcacacaattttcatcttattaaaaacagcaccttgaacatcacaaaatttaaatgcagcttaataaataattagacggtcaacattcaaaatccaactcatttaaattttaatgtaaaatagaatatttaagtgttgttttcaattaaatttttattataaataaaattttcattaaatataattataaattattgagataaaagttcgatttgaaaaataaattaacacatacaaacataaattattaaaataaaactccaattttaataataaaaaataacacaaaaatacacttgacatataaatttgtcgttttgaatatgaattaaatgaacaaacaaagatgtgcgagagattaagtgattcacgaatgtaataactttttatgcttaaattccctaactactttttcctcctccaatcacatgttttgtatatgcattaataattgtgctgaaacatgaaaactagggacatggtcacaatatttattaaattttgggtcatgctaacaaaacgagaaatttgagagcgaataagaaaaagagaaaaagacagaacaatattcaacgtgtagtttgcgttttctttctcttcaagaacacagggagtctcggttaccgagcatcatctctctgtgttttcccatatcttctctttccagtcgttggtcaacctttgttcattggttctctttctctttccatttcaagtcttcgcttctttggttcaaaggacttgagcattattgatgttaaactagccatcttcttcagtttcttcttcttcttcttcttcttcttcttcttcttcttcagcgttttgaagcctcttccaagagtctcttactcaagattcgcccctggttcattctctcaagctgctgttgagttcatcttccctcttaagtcttaactcaaagggtaacaccctgtatgtaatatttattctgcttttgctcttaacatctttcccatgtcagttaagttctaaaagttcaaacttttttgctctcatgcctcaatttatttgatggatcatccccagatgaaaattcatatcagtttttgcttctgggaatctgagttttgttgcttgacttgcaagtgactttggtcttgtggttggcgaaacagtgacctttctcaattttgcttatttaatttgagcttagtttgtttggttatagattgtgttagctagcttttcaattgagatgggtacttaaaggggtttaatttcttcttttgcttctaaatttagtcaaacagtgctttgactcaattggaatctcgtatatttggggtcatggataactcatatgattcatcatcatccttgagtttcgtatcatctcacctgtcacatggttctagtaatcacaacgtgtcttccaccaccagcaatgagcatggggcaaatattgaaattttgagtctgaataagctcagtggaagccttgagaagctattgattgaggctgactatggttatagtgatgctgagattcttgttgaggacatccctgtgggtatacatcgctgtatattggcgtcgcgtagtccgttttttcatgagctttttaagaaagggactgatggatcagggaaggaaggaaagccaaggtatctcatgtcagatttggtgccttatggcacagttggatatgaagctttccaagtgttcttgtactatctgtatactggaaggctaaaggcttcaccaacagaagagacaacatgtgttgatgaaacatgtatccatgtagcatgccgccctgctatcaattatgccttagagctgatgtatgcttctgccacttttcagatgaaggagctggtattactttttcaggtattttggttgtcatttttagttcttcttcctttatcttattactaatttttgcgtgaaagagaagaaatgtgacaaattcagagcaattctacaaaatcattctgggctgaataacatagaaatactaccggttaaagcttttttttttttatcagcaaatatttgttgttagaatgctagctttattagtagaggggatcgaacctgtgacctttcctccacttcccttctcccttaaccattcaacccaccttatatctccgtcctacccattaaagtatcccaatgtttacctaagactaaaagcagataaacattgtacatttggcaagttttggaaattgtttccaacttacatgtgtgtctttctgaatttgttcaacactttatgtgcctagtgaacaaattttgaaatagatgtacacctagcctaactgcacacacatatgcacacttgtgactacattatgtacctttgtccactaagctcttctgattttccactgctgcttttaacttctaacatatatcttgaggatgatatttagatcctatattacagtctctgttacttctatgtttctctattattaccaaaaaaaaaaaaaaaaagacagacatcttttgcttaacaaatctaatgtaaatatctctttactgatgcagcggcatctcctaaattttgttgagaaggctgttgtggaagatgtcattcctattcttatggctgctttcaactgccaactagaccagcttctctctcagtgcattcagagagtagcaaggtctgactttgacaacatatctttggaaaaagagctccctcatgaagttgtgactgaaatcaaatcactccgactcccatttcagccagaatccacacctaatgcaatggaagtggagtccttgaatgaaaagaatatcaggagaatccacaaggcattggactctgatgatgttgagctactgaagcttcttctaaatgagtctagtgtcactctagatgatgcatatgccctgcactatgcttgtgcctatagcgattctaaggttattcaagaagttcttagtctaggcatggctgatattcttcgtagaaattcccgaggatacacagttcttcatgtggctgcaaggcgaaaggatccatccattttggtagcactactgaataaaggggcacgtgcatcagataccactccagatggacaaaccgctcttgcaatttgtcagaggttgacaagatgcaaggattatcatgagaaaacagtgcagtgtaaggaatctaacaaggacaggctctgtgttgatgtcctggagagggagatgagaagaaattctatgattgtgaatatgtctgtttcatcacagttaacagctgatgatttgcacatgagactggattaccttgaagatagaggtagggctttctcttgtctaggtcgctttgtttctatgaatattgggttttggaccttttagttgagttggaaagttgaaagggtaaaatccagaatattattttccattgttcagaaaaatacatagattgatacaaatatataaactctaatgaaactattccaaatcgggaataaatctgtgcacaatcaaatcctcctaattacagtagtaatggtaacttattaattacaaatgcatagttaataccagtaagctgttattttactttaggaatatgcatgcatcataaccacaacaaaactatatttgcatgatgcttttaaatttggaagcctatggacatgaaattaacatgctccatatgttgcagttacatttgctcggctgttgtttcctgctgaggctagggtagccattgagaatgctgaagcagattcatcatcgctgtacgcatattcatcggctttgaagggcaaaaatggcaacccgaaagaagtagatctaaatgaatctccctctgctcgaaccaaaaaactccagttaagattgcatgcccttatgaaaacaggtatgtccaagacaattttgaaatagcatccttgtagaggttatgcatctgtggaatgtggatatgatttattctattaacaccaagtctagcttgcttgtatgttgccttggttggaacatgccacaattgtgaaaatctcagaattacatgatgcatgccaacaaaaaagtaaaaataaaactttccacttacacagatggagtgtagtaactactaattaacaaagaaactttttatcacttgtatataagcaaagtttatttaaaaacacagtgcaagggatactctaactcatgtacaagagtgttataagaccaaatcagagggataagagacaagttataggattagtacaccaatcagaaaaggagcattgaacactacttattttttccttaaagcatgtctacgatccaaccttaatcaattctagatttctagtgtgctagtgaagttaaaaggaacaccctgaaacaaaatattgtttctcataatctaagtagaccatatcatagcgtaccaaataagatatcaaatggaacttaaaactttccttcttatgatagagctaaccatgcatttgtagtactttacagcttaacacaaatggaaatgaatttaatgcaacttgcaattgtagaggaaaagaatgatggtggtttaatgttgttattaaaattctgagaatgctttttgaattatgtacagttgagaatggtaggcgcttctttccccattgctctgaagtgcttgataagtttctggaagatgacgaaatgccagatgttttcttccttgagaagggaagtgaagacgagcagagaatcaagaaagcacgcttcatggagcttaaagatgatgtgcagaaggcatttcacaaggatatggctgaaaataaccattcttgtttttcatctgcggtgtcttcctcatcttcctcaactcgtagggaaggtcttaaccatagagtaaggagaaaatgaagtccatgttcttctatgtagagtgttgcaacttgcaagtagaagctgtggaatatttagaaaaaataagatggaatgttaaattaggggttttttctaatgaacatgggagatttttactagcttgatttagtttcttatagttgttgtaccaagagaagaagaaaaagaaaagacgaattggcttctagtaatatctttgttccttttcgaagacccaaaagtgtgtattttttacattgttatctgattatagattgttatataattgaaatttttacctcctctaataattactttaaagatcatatgcaagacactttgaaagtcatttttaattgattatccttgctaaattgtatatatatccattgtacaccgaaataattgtatatattgaaaacataaaaaaactaaactcttgtttcagttgcaacaaggagtaacccttatcttcaacaaagtaatgaaaggtttaatgtggacttattgctaggttgagttttgtttagaatattttttagaattgatatattaatataatataattgggcatctaaaaagactagtgggatgaatatcacctttactgttgaagtcattagttgtaatgaaatgataattgtgatgttacacgaaccaaccaacttaaaaggtgaaattagtttttctttttcttttcaacaataacacgtgagattatgttatcattatcagacatcaagccataaattatttatatattaaaggattgatggattccagcacaactcatggagagtctcaagatttttaatttttttccttattttaatccagagtcagaggatctaaatttcaaagggcaagtcatttctccattttttctttcttttattaatcttttgttcgtatttgttataatacaagtttgaggtgaagtctcacattaggaatgaatgagaagattgaacaccatataattgagaatcaagaaacttgttgatagaaaacccgaaaaaagggtgtcctcttaagcacgccacacacattaactagataatataattgccacttttaacattgattaattaatgagtaaattatatttgcatttttttcatattgcacctggtactcctttctttttatacattacttttaactttttttgttaacgtcgttaactaatatcaattgaaatatttgagcagacgaaattgtccgttagagtaaattacactcgcatctcctatgtttttctcaaattgcacctgatacccttcctttttatacattatttttacctcttttgttagtgtctaaggaaccgaggcagcggtgatggtgaccgaagttacggcaagggacgaggaggtggtggagatggatatggtagtgtcgacgatggctacggtgaaggttgtggctacggtgacagtggtcgttctggcataagtgggtgcgctcggacgccatgtaagtgggcgaggacgacaatgagaagaagagatgatattgtcgtgggagagagaggaggaggagaaggaggtggtggtggtaagtgaagaggggttgttaaacaagaggaagatttgtaaaatccaaaatgtgattttgaggaaggaggtgatggtgttttagacataaattttcattaaaaatcatgtgactagtatgtgtctactttctgttaaattatcaaaaggtgtttaggagagagagagagagtctatgtgtaatgtgagctaaacaattaagagattttttgtagggtgtaaaaaaggaaggatatcgaatgcaattaaaaaaagagaggagataagagtgtaatttactcttaattaatcaccaaataattcttgcaagtttgcaatgtttataaaattaccaagctttttttgttttcccccattgaatgggaccttttacatacaaataaaatataaataggatagaaaaatactaattcaataatagaagagtttttcttagtgagaaaaaaatacatttgtttaaaacttttagtttagaaaagtctcaaaagtaaattgcagaagattgtttttgaggtaacttgtaaatatctaatggcaattaatttgatttaaagattgatttaaaagttaaagaaattcatatattgttttttgagtaattaattaaggatgattaaattctgatttgataagaaagctctaagtcatataccagaaaataaaaataaaaaatgtaactcaaaagtaaaatgttgttaccctttgaagaatgttctctgaaatttataatatacaaatggattaacacatttttccttcttttttttacacattttaaaactgattatatgcttgcaaactgattaaatgaatgggttgctcttcaaccatgctggtaacttgagatgtatacagttctaactcaaaagtatcacacattgtataacggttacctcctaaccatattggtaaacttctgagggcctagaagtgaaaaaccataggcagtaggtagtgacaagagtttctttacttttcctacatatgccctttttgtgaagttattataatcattggcttcaatggaatctaatatttgcctatacaacaacaatgatgcccacacaggccacctgctagctgagttgagctctgcaacccctctctctgcctcatcaaaaaacatcctcgccctctttatttgtcccttcatgaatttccgccatttgtctgtaactcttccgcggaaaatgtcatcatctgaaaggccagcttgtgccaattcatcttgtgggagatatactcttcctcttctagcactataatgatcaagaactagaccaagttagacaaaacataatttgaatgatgtggacaattaaaattaagagtttaactttcatgtatgtacattaaagatttttatattagaaaagtaattcttataaaataaacaatcttttcatatatgataatctatataattaaattctaaaattgaatgttgaggggcattggcttaattgattgtatgaaacaagtgttattttgttgttaatgttgttatttttattcatttcttggaattgtgatgtgagatacccttgagtgacaagaggttcaatgccatttgtttattgtttttggtttaattgcaatgcattgaagtgttcaaagaaccttactcttctccaacatctctaagtatgttggtaagttgatttgcaatgcctagagccaatgcagcattataaatgctctctgttgaagcatttgattctggtgctatccccattactgggacactcataaggcctactgtcccagcaacatagtaacagtaaaggtagagctcatcaaagttattgtatctagacgttctcaggtccatcctcatcccttcgatcatgtccttgaagggctgtttcaaaaagacaatgcaatgtcatttggatcagttttagcacataaaaaagaaggtgaaatctagttttataattttgtttttcgacagaattagtcctctattctgtataagataaccaatttacttctagtctctaatttgaacatgttatatctaaaggataaaacttacatacagttgcataggtgcttttggcattattctttatcccaacttggagtttcactttgataatatgcataataaaagtttacataaatgtcaagtcaacctagattatcaaaggtgaaactcccattttgatagagaacaacatcaaaatcaactaaagaactttttatgtaaggtttgtcctaaaatgatgtaatgcttagatttgggcatgtaaagtacctgaatatcaacagggtactttgagacagtatgtgagagggcagcatcatacatatcatagggtcggccttcaaaaacatcactcaatcgttgctcccacctgtccaaggccccaggggtgatgtgtgaagcatttgggccatccactagctcatcagttcttctgcaccacactgcaatgcgcaatgaataattgtcaattccaaaacaactctcactggagaagctgaagtagcagtgtgtaatataatctaatcacacataccataaattgcccaaattgcttttcggcgctctgcagtcatcaattgtgtgcctagagtatacagttttcaagatgagtcaattcaacaacaaaatatattattaacaaataaaattttaaaatccattaaaaatagtaaaaatattttaatctagctgctaagtacttttctgtacccagcaaaacaaaaggcatatatcatatgaattgaactttgtaattagacttaaggtttaggaacaaaagaaacatttcaattatattaacgttgtggtggaagaggagaaattactagatggtctgagaccatcattgtctcttgtctcccacaatctttacatgacacataattgaattttatgaaatatttgtcataaattaaaaaacttcattatgtgtcatcgtgcaaagattaactgagatcatgaacacataataactttgaaccatttaataattttctggagacatagagacattatttagatatgatgggggaacaaaataagaggactaaaattcatttgaatcagaaaaaaatgaatgagaaaaggctcaaaacaaaagagcagcaagtacctaagtaaaatgtcttggcatactcagcacaaacttcaccacaccgatcataagccgcattcaacagatccacattgttgaaatcagcctcaacgtctttgtccaaatccagagctatgtttgtaccccttttgtgttcttttaccaaagctgcttgcttcagcaccacttcatagaccctctcctctgaggatcttgaagtctcagtagctgccactgcacttgaaaaagcagaagcaccactagcaaaactgattccagaaaacctcttttgtgttctttcaccaccactactactcctgcatgaaaaactcaccaaggagttgatgttctctttgggtccacaactcacccaaagaagaacaccagacatctcaagaacaaggcacaatttttactgctgttggtgcagctccacaagtgaaagtgcacaccaatgaaaagagagggaaagaaattggatgaaaaccttttgagaatgagtgtataattgtgttagcaaaactatgatgaggttttttttcgtttgtgaggctgtcacaaattttagaacctgcccaaagatatagaggaaattgtgaatgtaatcctatagccttaacacatgtcaaaatgtatggacagtgtccttgtaatccttaacgtgatcaacttgtttgtctttagtgcacgatcctcttcactctcagcctctctattttgagcacaattttgtttggttttctttattttattgtagccccagaaaaaaggggcaaccttacattacattttacgtgtgtatgtggtcctatcttttgttttgcttgtgtagttgtagaatggatggcttaaatgcctttgatagtgtttttgtaagcattacttgtatagtttaggtttgtccagattcagagtcataaaacaaagggatcaacatcaattgattaaatagatatgagttattataaattctcatatttatctttcatttttacctataaaaaaaatatattttgaatcgtaattttttttgttgagtctgcattacacatctaaataatttcttagtaggcagacttaattttatttgatatatatattatttttcacgaaaggaaaaaaaaaattgtattttacaataatacattaagtaattttactcgttattttttaattaattggcacactcacttaagtatgagttagaaagtacaaaagggaatcaatgcatccaacactaagaagatttgatccacaaactagataccatgttagatctatatatatatattattatgagggtaaagagacagcaacatatgcatgtaattaatgttatggttcattatcaattcctccgagaattgaaactagctctgtgttttttgacctacgattttttattttttatttaattaatttttttctacaaaattgattaattttggaatgaagtgaaacctgacatgatagaagcaatgctacttgtagattattttatcaatcttttacgtttatagtccaccccgttaactattttgactaaaggcactatctaagtcaaatggttaagaatatatcttattttacccaatccaattaatataacaggcttaacacttcatcccatgcatcacataacaattaagttaaactctaaaatctaaaacgacagccgaagtaagacatacatttgaggattattgatttgaacttttataaaagttaattttaacttatggaagaagtttatctaaacataatctgaatatttgcctcattaattgctgaaaataatgataaactaaaataaccaaaagctgtaaagtctttttagtcatgaaacacgagatgccagaggaatattcgactttcgagcctcaagtttcttccttggggcctcagccacaacctcatgggtatgcgaaaacaaattgaagcacaccaccacgtgcacttcattcgtgtcaacttcatggagctgatctccaaataacttatgaacgttttccattctctatcgtggcagaaattgaaccaaagcttaaactgcctaacaggctttcaaatgtagaatatttaaaatattaattagagcataaagacgaatatgcgtgatgttgttctttcctaccacaattaattaaccttgatgccaattcagatgcataaaatattctacgacgattacgacaagtttggaagttcacacggttggtttcttcttttaataacatcaactcttcaagtaaaaccgaacataaatgctgactatattgcaccttaattaaacatttcaatacaacccgcggaaactcgcaataaaaattaattttgcataaaacatttcattaaacatttctttttctctatcacatgaataattaattattctgtaattacatctattaaaaaagttccacttcactatttgtgtgtgtcaaatatcacccaattagtcattttataatacatcttgaaatgttccttgttaaagataaataattaattcacgtaaggattgtagtcaaagtcaaatatgccaagacttgaaataccctttatataacaatcaaagcaatgcaactgcatgctataataataaataatcaacagaatataagtttcagcatatataactcaaccatgctgccagctatatatagctaattgcagtagtagataagaaatcaaatcgcaagtgggctctttcaagtttttaacttattgtcctcaggagcgtctagattcttggagatggtttcatacgtttccttaatttttttgagtgttaaataactctttctaagcatttatgagggatggaatttagcgtagtttaaaattttgaacgttggcgtcacattgacaacaaattaagttgttcctcttcctccatgtcaaagcttcaaagggatatgctttcatgaacttttagaatcccgaaaggactttgtctttttctctccatttttatggtgaatgtatgtggacaactagctagctgggtgatcaaggaaaggccacgataaccaatcagaaccaagttaatggtgtgagctgttaatattgtcaagcaataaacaataaggaacttagtcagaattttctttttacatgtttcatagagaacccaacgctagctattttacatccgaagaaagaaagaaagaaatagaacagaaagatgtgatagtttcgaggtgttcaaacaataataccctataggctgagaaacccctaagtagacaacatgaatttcggcaaaggatcaggatcggacaagggtgaaagtattttgcttttttaaatcgtagaatggttataaaatttatatatgtaaaaatatatattattagataaaaattaattattataaaatttattatgtaaacttatatatgtattaaatatacattagaaattttaatgttatatataatgatattaattattttttaacataaatgacctgttagttcagttgatttggattgtccaatccgtatgaatcttatagattacgaattcataatgctcttatgaattacaagcttttatttattaaagggtaatatcggaattgtaatgtttagtgcgggatatattgaaaattcgtctggtgtaggaagcaatatgcctagtcctcttgggtcgtgaaatgtgggctgagttgctaacagcgattgtcatccgaataacccactcaacgaccccttattctacccgcagagagatgattgtaattggtagctttcaagtttcagagcttcggatcgagtatacacttttgggtaacgaaatgaaacgatgttgcgtaactgcagttgcacatgcatctattatagttaattagcttaaaagttttgtctacggtaattttatatattcatttattaattctcaactattttttaagtaaaattaattatatttacccatataattaagggatttactaatttacacacttatatttttttaatatgaatatattgacaaactatatcattatcgtattttaatatgtatatatactgcaatggcaaaaattacaagtaaaaataaatactagcgtcacaccaacaccacttgatactatttgtatggataaaattcacactagaaattattttcccttcttacaaatcaacaagttgaatgattgatgaagaacaagcaaaggcaatgacgattaattaaggaggtgatcccaagagaaaggcctaagaatttgaggagccctaacctccatgaaattcaaatgagccttgagaaggtgcatgtaaaccaaccaatcaccattcccattagcacaaggcattggcatgacatagccagaatctccaccccaaggaaaatggtacgatgcaaacacgggcttcccccacccaaagtcaacctttgactccggaaacctttgccctgaagaaacaacaaaacttggtcctttttcttttccatgcccacaataaatccttgacaaaccaggcacaggtcggtgtacttcaacccaatcaacaagccctaaaaaatggtcttctgtcacacccatcttcaaaaactcatgaactttctccgccacccaactcaatggcttttccacaagctcatcaaccgcattcccaccataaggaatcgaaagaacattgccaaaatacgaactcatgttcttttcatcgttgcataacatcttccttccatcaaccacaatacccatcttggcaacaacgtttttcttaccatcaacactagcagttgcttcagcaaccatcttccacaagaatgcagagaaagactggagctttgtgcgcttcacggtaccgtttgagctagctagtgcttgcatgcggttcaggtattcgcttgtgacgtagtatatgcggctgatgagtggctcagatttgaacacgagtttcttattaggatctgacggtggaggtagcgccgagacgggaacgtatatgtggtggagtgaagggtggatggaaggtgggcgtcgtggggtaagaagggaacgtcggaaacatggctgggctgctattatgggcttgttgggccgggttgtttcggcccatgatacgaggaacatgttcgcagagtaggcatcagctatgcgatggtcgaaagtacatgcaactactaaacccccacaattaagctgagttgcctgcaaaactcacatgtcttataagataaataattaataatatgttttccgcgcgtttaagaaccaagattattattttttatttagagcatatttagtgtatgagcaaacaccttcagcttaaaatttcgtctttattagatcttctaataaaaaagataaacaaattttcattatgaagaatgagttgttatagaagaatcatgaaaatgcacaatattcaaagaataattttttatctctttctttcctaagatttcaaaatgagatttaccaatataaaagatgagagaaatcttacatcctaaataacattataggatctacaaaaaaaaatatctaaaatctcaatttgaaatctaccactaaagatgttttaatatttcatttctttaatcctatatataaaactcaattatctaattcattaaattaaaaaaataattaatttaattaatatcaataattttgttttaaatttttaatgttttataaaattatcattatcatttatatttcatttttaattatttttaatatattctttttcttcttttaacgatgaacaaacacagttttaaatttaggtcttataaaaaaatcaaagaagtataaaaataagtttgactaaccagtactcttataatacttgctaaaaaattcaaagaaaaaagattttaatgtaaaattataagaaaatatagaaaaaattaattatgatcactaacataatttttgacatctcaataaaaaaactttattcttttagttttctaacctatgttctaatatactagctaacatatgctggtaaacattttcaaaatataggtttgtttatcaagttgttttatagtgtatcacctgaacagcaagcacgccatgtttcttccttggtacaagcttcccttcaacagtgtcatcaggattgtacaagttgaggcactgtagctcaacatcagctacagcttcaaaaaaatctaccccacggttactgcaaaacagctcaggctcacccatggtgttggccaccatttcaccagcaaaagggtaatagtatactagagcccgagccagtgcatttttcagtgacctcaccatggttccaaagcaataatatttttcaggcaaaggttttttgtagcagaagaatacactcacgtctactgggggaatgagtagatcaaggtttgatagtggcagccattgctctttcattgaaagctctggtaccactacctcctccttggtcacactcacaatgaattttccttctccaaccttaccatccatttttcaggaatattaaaactgtgtagctagctaggcttgttaattcaccatggcagtactacttgattggcttattaatgcacaggctgtaagggtcgcatgaatttactggcagtggcctagagagacatgcgaattgaatgtgccatgtttgatattaatgtcaattttaagcctgatctcataacacaatttgtatcattaattcaaatcacgtttacttgactgaaaaatactatatttccaattgtagtatcttgtacttcccgaacaatatcaaaacgtttgttgtgtgtaaatattactgtatttctgataagaataacattaaatgtcaactggcaaattaagtatggtagttgttggtgaccacccgcatgcttgttacttagttttcaattgagtatgtggttctatatatatccactaaaggtctttcatgatggcagaattggggacctgtgtgatgctatatatcacattaataaattttcactccatagtgttggctattaattaagtgtggcatatattacttcttttacttctggcaggaaaaagtcactggactaataaaaaaagcaatataaaaccgtctaaagctaaagaacattgattgatagtagtatattaccaaaatataaaaatcataaattaaagactaacacctatttgaaaatttttaaccgcgactagttgtcaaaatcccctcaagtttcaaaaagaaacactgaggaagaagtccaatggtatgctactgagcaaggcttttagtaccaaaagctgctattaataaattgttgtgttttgtaacacttcataaggctcatggttttttaggttacaacataacgatatggtttagctttcctttaagtgtatatataaatacaaacaaacaagtataaccaaagtgtgtgcttgtctgcatgaaattgctttaagtgggccagatggagtccaaattattcgatttatctctcttgcgcgcccattgaaacgtgcctcatacaaaaaatggttttctctttaattaattattttcagagattattaaaatgttcacaattttatcttttaacgttcaaattttctcccaatctccactaaatgttaatgctttcattctcagtttttatataccttttatctgatttttttcttcttatcttatcactaatttttgaaagctttttgttcctctctttccttctgtgagaagtctggattgttatatatataaattacttatgcgcttgtcagttctgcgaatcttttaacttttatcattttttttaattattagattctaaacttttttcttctctcaattggttggccgaatgaccaaaaggataattccttttcaaatttatcaaacaaattttgaattaatactcataaaaaattgacaactttttttattgaagtaaaaaaagctgaacaactttagttttttttttttctttttatatgaagttgtaaatttttttattactccaaagtctccaaagttttatgatcttttacgactttcaaattctatttttaaatttttaaattattggtattaataaataatattaacttaaaatttatcaaataatatttgattttttaaatgttttttaattagtttttacatttatcaattaaggaaactaataattttgtagagccacagcttctcctacaacacccacagggacagctgccttcacttcatccgttagtcgtatcgaccggcgaatgatctcatggaggctttccattcctgtcctacataacatgttatattctgtgcttcaacaagtccatccatcattgcatcatagtatatttgcctcgttaattgttgcagctgaggattgtagccttgtttctcatcacttcactaatggccagaggatgaagcttcttctacctcgtcgtccccgggttcttccttcactcctttcagtgcgagatccttatcaggctcaacttaaaacggcatttgaatttgatgttgcccattcgtctaaatcacgaaagctcagctttgcctcaaggagtccgttgataattccaatcatgtacatcctcattgcaactgtgggtagtaccacattccaattgggtgacaatttaacccatttactcctgttttaagctgcacttctggttttaacaatatccagaaaaggaaagctatgtccatctgtcattccatcatatattattcccctcaatatttcttgatgctcagagtgaggatcatagccttgttcctcatcgatcacttccctgatggcctgaggttgaagcttctacaactttcattgtactgattgcatctaggaaaggcgttgtttcgagtacatgtaggaaagatgtcaggagggagtgtttttttattatcctgttcggattccaatttgtccttagcctgcgtagatatctcctttataaatccaattagggaatacaattcctctaaacctttaccctgcaaatcctttcttttttcatactagtccactgattcaatgaacatccgcttaatcatttcgtgtagagataattccactattatctttttccattaattcctgcttaggatctttcataggaactaatgccggtgacaacaacatgtttgaatacttggggtctggacacgtgatttggacatcttccatgttgttcgctccttcgaattcttcatacacaaagactccccaacaacttagcgtcaaggtggacgtggcttcgtatgaaacttgcactacaatccactcgtgctcgagaaacactgcatcaaggctaagccactcctcgtcactgaacaaaactcgtagatcacaaattaagacgtgatctgctgcaactctgaagttgtaatagcctttgtggtgaggaacacatcgagtgccattgataataaggtgcaaatcaacaagttcaggaagagaatactgtctcgctctcgcccttccacttacatcctggaagaccacgaatcctgaaacgcttaaatgagaaagtcgtttgagaaatccaacggttttatgaacagcaattaggtttctacaattatctagtctcagttcccttagattttgaacttcagaaacatcatgcatttcggtgattgattggttatgtgaaaaattcatctgagtcagccatgaaaatctctgccagaaagaaaaggttagtacaatgattagcaacatgtttgggttatactattatttttaaatgtgagtaacaatggaagcttttgttaaatgaaaaaataaaaggaagtagaaagaacaagaaaacattctacacaattgtaccttaaatggctcttccaacgttagatggcttctaggcaaattaaagacaatgatttccttcggatgaaattttgatgggaaagactttgaaggatattcttcccagtcaagcaccctcaaatgatttggcagatgtttaggctcagatgaaaaagatgtgtttcgaacaatgagaattctgagccatttcattttctcaaaagcaaaaccactccaatctacttctgctcgctggggaggatcaagcattatccccttaatcttgtcacttcctttaaaaaaagtacaaacaagtaacgtcaaatgcatgttgtcattattacaatagactataatgtataatttataaaacaaaagatacatgattcttaccaaatcatcagttagtatttcaataacatcaacataatgccatagtccgctacgttggccaggattttttggtgcctccttcctaacaatctctctacccatatcttgtattagatcatgcatcttcaagcagccatactcaatggtgagaagagatttattaacataataccatagtctgctaagtcatttatggatttgtccttttggaccggttttaactgttatttgaccggtttaaggtgtccttgacagactcagttaatatttagcccggaacgtgtcatatgttttttgtctcgtagaggatcgttggctttacaagcgattaagggtaattaatatttaccccagaacaggtagtgaagagaaaagaaaggaaagaaattgtgggttctaatttttcactaaaaaaacataagaagtaaaaaaaaaaaacatataacttttattcaatagcaaaagaaaaatagaaggtaaacaacaggaaagttaagagcatgaccacaaggaatatccaaattaaacacaagcaaacaactgaaaatgaaagaaagcacaaattcaacacattctattaagtttaacactacccactttcttcctcaatccctcactttcattggaatatgctaaaagtacatttggactaacatattcaaagatgatacactaatagctgttttccctgaaactcattcagcaactagattggaactttgtagagctggagaaccttgttccatgatggtctactgctaatgtcatcccaccaggcacccacatgcttcctctccattaataaatactttttgtccatattgttcacaacataatcaagaaatggaaggtggctaatatcagcaatgctgaagaaatccccagccaaatacttggtctttgagagcctctcctcatagatgttcaacacttgcaccagctttgcttcactttcctcaatcaccttgggatctggagtcacaccaaatattgaaccaaacaaaccatgaagacacaagttgtgggcttgtgggtgaaagttgtgtgcttcaacttctagccattgctccacaagacccctctcttctattgtttttcccagcaactcaaccccttgggatctgtatttttctgcataatacctcattatagcacgagattctgtagaaaaacatgaaaacactcaaattaaagggtaccagtaacaaaaactgaaggaacaataatcatagatcaacaaaattggttaacctattaatcatttgatcttttttaattttagttcagaaaactgttgagttttagtccctacacatacaagttaagttttgattctattgctaacacccatgattttaaatagtgttttgcaaccacaattgcgaccgcaatgtcaaacgtatagtttaaaatcgtaatttaaaatcatgctaacaccataaaagaatttctaacgctaaaacgtatagttttcttacaaagactctaaaacttagagagatataaaaagcaagtgaatagtttaaccaacaaactatatataagtagaaaagcagaacaaaggagcacaaagtgtaaccatataaggtataatctccatctttgatgacaggaacaactccaaatggctgcagatattatgaataaagaacatgaatgagaagataaagaattgaagacaaatcatattcaacaaaaaaaaaaaggaaaatagaagagttgaacctgtagtttgaggtagtcaggatccttctgctcccccttatcgacatcaacagggacaacctcaaattcgacttccttctcaaccagacaaaccagcacccgctttgtggaagcacagtggggaccgtatactttcactaccatggtttgattctcttgaaaaatggttcaaaacaagagtgaaatggaagagccacttatatagttatattactcaggtttgatcagcaaatatatattattgtttagttagtgacccaaaacaacttatagctctacatgtcaagtggtcagtgaaagcagcaagcaaattaacaaatatcaagttgatgggtgggatctaatctggggacaccacgttaaacaagagattaatatttaatatttattgtataattttaatcaattaattaatgttatgcgtaaacaactttaactttaactttagttaatagattaataaaaggtaaatggtaatcaatattttaaaaatattggttgaaaaacttaaaataaaaatatttttattaaaaaaaattatgttatttataaatttttttacaattttttacaatttaaataataaatattttttctttaactttaactaatatcttagaaatatttatcaataacatatttgtataaataaatgatatcagaaatgcagcataggagaatcacttttcattagttaatagttattaagtggagaaagaaactcactggttgttgcttctggagagactcttgggtccttatcttttttgggctattagattataagatcatacgtcgtgatcttatttcctcccttgggtcaataattcaggtgcgcttatgttttcaaaatatttggttgtttggtatatgtgtgtgtgtgtgttagtctttgctaataacttacatatgtggtcttaaataagaatggaattgaagtaactcatggtttccacaggttcacgctaaggagttaagttgatccttttgaaaaacagtacattggaacacgaatttgaattatgtaaactccgtatgtacgaaaaggaaaaattatgtaaagaacctaaccaatatatggttattatcaagcctagttgcatttcttatttttcaaggttcacaattatattattttaatttttttatgttctaattgccctaattaagtcctcaactatttttaattctgcaatcaagtctctatcattaatctgctaaatataatatttttgctatattgcctaaacatatatattgatttgacattaaatgatgacgtaatgcttatgttacatgcaaaagtgatgagaaacaaatttagtaatggagatgagattcgaactatcacgccatcaaattgtgacaaccatcaagcactacattagtatgtttgtaacatgtcaatatgtgtatcaacatctatcaatgtgacatcatgctaacttagcatatccatgtcatgttagcaaagtctgttaaacatgtaacgttgatggaggaatttgattgtaaaattgaagataatttagagactcgattaatataattaaaacctgagatattattaaacttgcacaatatatcctaatatctaacaaatcaaaaatataattaaatcttattttaaagtaatagctatcaaaattgctattatagagcttttcagtggtttattattattattattattattattattattattattattattattattattattattattatttgctatattttttaaaattattatcttaagtatttatatttaaatatttatattttgttattaaaccagataacatgtttaaaataaacagcctcttctttttttaggtgaagactcataacatgttaacctcttgtacatagttcaaatctaatggaaagccattgttataactacagtataagacgacactccaactaaaaaaactaatactacatttgttaattaattgggagagtctcatgacttgtgtatataatactacattaaacttttttttttactcggcagagaatcaaagtgatcaatgtctcatgtgaatgagccatttggaaaaacattcgtcatatatattcttattgagtaagaaaaatagagggtaaacagatcgaatgctaagaacatgaccatgaggaatatccaaattccacacaagtacacaactgaaaataaaaaggagatcaaggaagtacaaatcaacacattccattccatgaggttgaacattacccactttcttcctcaattcctaactttctttggaatttggtaaaagttcatttattcttctctaacatatacattcaatgatgatactgttgccattccatataacaacagatactaataattcagtttccatgaagtccattcaaaattagattggagccttgtagagctggagaaccttctttcatgatggtctattgctaatgtcatcccaccatgcactcacatgcttctctcctttatcaaataccctttctcccttttgttcacaacatactcaacaaaaggaaggtggctaatgtcagcaaggctgaagaaatctccagccaaatacttagtatttgacagcctctcatcataaatgttcaacacctgacccagctttgcttcactctccttaatcaccttgggatcttaagtcactccaagcattgtagcaaacaatacatgaagagccaagttgtaggctggtgggtgaaagttgtgtgcttcaacttctaaccactgttccacaacctctcttctactgtcctccccatcaactctaccccttgagacctgtatttttctgaataaaactcattatagcacgagattctgcagaaacacatgaaagcactcaaattagcaggtaccatgtaagagtagaaccaaaattagttgaaccggagaaacaatattaatcattaagcaagaaaatgagttcaaagtgtaaccatataaggtgtaatctccatctttaatgacaggaacgcatccaaagggctgcagatattacgaataaagaacattataatcagaaaatacagaattaatcaaataataatcttgaagactctaatcatattcaacaagaacggaaggaatatagatagatggaagagctgaacctgtaatttgaggaactcaggattcttctgtttccccttaaagatatcaacatggataacctcaaattcgatttccttctcttccagacaaactagcacccgtttgtggaagcacagctgggtccgtacaccttcactaccatggttaatttgtttctcttgaaaaatccttcaacaagagtgaattggaagagccacttattgttgcttagttacacttcttatagtgcctctacatgtgaaatagtcaaacaaagtctacatcaacacaaacaaaactgaggttgatgggtgagatttggggacaccacgtgagaaagagggggatcaatgtttaattgatagggcatgcatgcattcaaaatacgttttcctgcgtgttagtctttctaactcacacatggtcttaaataaaagtggtagtgatcgactattactgactaaattggcaggaaattgatcaaaatgcattcgaaacactttatcattttgtttacaaacgcgctactacttaaacccttgaaaaggtagaacgtgcccagatgacaaaatagggaatgaagagaaattcagtttgataataacaatgtcttcatttcagcttttaattcttgttcttggatcttattttaggacattaattgaattgaaggtatcctctccaactcaagcactgtatcttttagttatataaatttacatgtcaagtgataattcatattatttgagtcactattgtttagtatgctgaattaactcattcactggaaacattatatatatatatatatatatatatatatatatatatataatacaatataatataaagaacttcaaccaagcctttgattaaaaaaaatcagatgggtctcttgaatcaatttttaacatatatatatatatatatatatataaatcaacatataaagtaaaaaatgattatatttttacaaaatttaaaaaaaatgcaactcaaactgaaattaggtaaagatctcttgcagcaccactatttgtgaaagaaatcttgtaattgtaaatgctctaggaaagaataatgatcttctctttattaaaatgggaaacattatagaatgaaccctcaaaagactggccaattgttattttaagtctttcaacataatttaaaaaaaaaaaaatagacactttttcaccaaaaaaataatgtcacctttttagatccacgactaacaaatatcaatttattcacagaatgatcagcagctactcatgagaagaaatcatgaaagaaatctgactggacagatctaagcttcctactgttcttatccaaaaccattcagttctatcactttcctcctgtgaatgaaaattttcctcactgcttacgcagggatgaaactatatatagttctatggtactgcaaaatttgaataatcaactgctgatacaaagcaaccagcatgctgaatgatgtttattcgtacttagtttccagaatattgaattacttctcatataagtgactacaacgggatgggatgaacatatacagatatcaaaatgacaccacagacagcaaatgagtctccgactatagctgagataatgtagtatcactttcttcaatctcatcaaattccactggtttcccacaaacaagcttcctgtaaatcaaatatcaaattataaggacatttataaattcatatattaagaatcaacaagttagaaataaaacaacacaatacagctatttcaaaataaaaacagcaaattccccaacaaaataaaacaaataatttataaaaacagtggattagatgcaactagacatgccgaacaaatgggtattcctcaaccatttggaatgactttttatccttcaaatgtgttaaactcgactgaaatttctatggtcaacaaaaatcaaccattactaacatccagcacattatatatatggaaagcataacatgcaccaactgaaattgtcatttgcaccaaaaaaaaaaaaaactgaaattgtcatttttgtcatggttaacagaaattttacaaagattttttcttctttttgctcctttaatccttcttatcaggtaaaccgatgacaatcaattgttattaactagagatacctttgagatataaaattctcctcacacagtgccttatccagcctctcttcaaatggggttgcatgccattttactttctggtcctagggacaataagcactaatcagaagctgtagatagatttagaaaccttataacaaataatgataatgattacaagccatacctccttgtacttagttgttgaattcgggatgccattgccataccaccacttgaatgacataggcgaatgctcctcgatggttgacacaggacttattctagtagacaaatttgaattgacctcatcgtcattttcatttgaaaatttcttggaccctttttctggggtaggagtttcattttgagctttctcaaccaaatcactcagctcacttgaatcttcttcaaggttaaaatctctctccttgagtattttgcaccagaagacattatcacctggttcgttagttggatagacaaactgggaccgaacttgagccttagccttacgtaactcttctaatgatgcagggtacagagttcctggtgtttgcatctcgtcaaataacttcaatggggtaggataaggagatggtttatgcgcactttggctatttggtgacttgttttccttcatatgccaatcatctgatgagcttccataggttgccaagtcagtttcactttcaaaacgaacagacttgttctttctctgagtatatgtggctagcaaaggtgaaaccaaagctgcattcctttcagacctatctgccgcatgaaggttccctgaccaatttttttccatatagtcaacagagtcatcttcagtatcttgtgctttggagatacagctgcaaaagaaatgaaattaaaatctgatcaggttctagtcctccctccaatataattatcaatggacaattctaagttccaaccaacaatcatacaattaagtaattatctaaaatccaaaatatgaaagaaaggatgcaggaaccatttgaagggcactttttttaaagcagaacgaattgtctgattctatattatagttaaaatgcagttgctataccaaggagctctaactattgagaatgtatctaaagcttactataaaaattgagtaaaaatcgaagattcacctaccatgcaaattgactaaaatatcacttgttcaaattcattatcattcaatatcagcattaacataaaaaaaaaaaaaaaaaaaaaagtcatgaataacctgcttggcgtgtgctcaaatgaatccatgctatttcccaacttttggcaaagatttatgggtgttggtggatcaaatggttggacatccagctgcagtttctccacagacgtgttaggaagccaagaatgaaatcttgaagggtctgaatctttatcaggagcaggtgatttcaacttctcagatgctttacgaatttcaacaggtgttcctgctaaggtcccacaagctttaagaaacttagcctgtagaaagagtttatataaaaaattcaattgacaataacaaaatgaatacaatccataaaaaatgcaagaagaaaaaaaaaaaaaaaaaaaaaaaaattctatgagtaacttgaaagtatttgaaatttgatatataccatggtgcaagtataatcctctaggcattggatacaaaacaggtataacatgaggacacagcagatcatagaaagagtgatagatgactgacttttcacaagccaaaattgaaaaaagctaactaatggtcctaattgtggtcattattcaattgtttccagtatgttttacagaaaaggtttatgaaatcactctattgctttccatattttttctttatactacattcatgaaggttcgtaaaatttacaattcaaaactgtccaagaacaactaagaaacctatactatgtcagtttgcagattccattttgcccaggttaacgccaattcacaagataaaaattgaaccttattttactcaatgccctaactagttcaaacaaaaaatacaaaaattaaaaagaccaaacacctgagaaaaaccattaaaaaaatcatttcagctgcagtaatagtgcaataccaatattaatagcactatgaaaatacctcatccttaagcccctggaaatctccctcaaacccaacaccatcaatcctcgcagaatcatctctctcttctaaaaaggttatatcacaaaattagcgggaaaaataaaaaaagaaaatgtaaaagcgaaaagaaagaaaacgaagaaacaaagaaaagtaccttcagataataaagaagacgagcgatttcgagataccacaacaccctgggtttccacacagcgaaaattctaattactattaaaaatataaataaagtaattcgtgaaaacagcaaagacaaatgcgaaatgttacggtggatcgagtggaggaggtaatcaattgtgatgtgtttgtgcggcgattgtctctgatcctgaagcacgcgaagaagcagcccatcgctttggtgaaggatcggaagaagaaacggatcatgaaccctaacacgctcctcagcatatcagggaattcagaaaccctaacttggaattcaattgagaatcgagagagagagagagagagagagagagagagagagagagagagagagaggtgtgtgtgcgcagtgaggtgccttcgtccctgaagagtcgaatttgaattttgaagtggctcccagcgagggaaattaaattagaattattaataggataaatattcatgatatcttctaacatactaagtcagatattaattcgatgcatgcatgtcgctgacagattgatttttttttcttctaacatatatactaagtcagaaaccttataaaggaagttgaatttttttcttcttcttttataaacgtctaacttttaataaataatgatttttaaaaaattactatttttagtcataaaattaaaactaattattaaataatgataacattaattattatcctaacaacaacaaatatacaattagctttacacaattttatattaattattacaataaaacaacaaacacaactaattttacaaattttatactaattatcttttatatatatatatatatatatatatatatatacattaaatgttccaagggagaagagaggagaaaaggggtcctcgaaatcttgttggtccccctctaacacaagttttctattaaaataaattgttgctccacatttaaatttaaatgtagtgaattatatattattgacttagtatcacttttgatttattatgttttgtagttgttttattctaatatattaagttttgaaaattttattttgatactttaaatttttaaagtatctcattttgatcatttcttttgattttcgttagaaacattaatattatgttaactataaaattttaaaataatttaatatagtgacaactaaaaatcactattatctttattttatttcaaaaatttaaaccacaacaaaagaaaagaggtgaaagtattaaaattaagggtgcaaaagatatatagaaaaaaaaaaaaaaaaccatcaactaacaccctctatgcctctttctcatctttcccaacctcaacgcttcattatccaatctaaatggtcggaaaaaaaaaagactaaaaattttaaactattttgatttgtttaagtcataaatttcatcatatccaattcataactatctctaatttttaggaaaaattatttattataaatttgttatatgaaaaaaatatttatgatgtgattacacaaactcataatttcacttataaaagtgagaaattatttatctttttttaaataacaaaatatttattaaaatcgtgaaagttaccataagttatgacacccaataaaaataaggtttcacataacattaaatgacaaagacctatttaaatattttatgcattaaattataaaaaaacaactttgaccactattccctgatccataagaagattacagtaaaaaatatcctccttcaattccatgctcattaattaatttgttgtagttcaagtattctggtttaacttgttactagatatatgtctttctacaatttagtccacgaaagtttaaagtcactccctttttaatttctaaatgtattttttgtgttaatttaatcctaaatttaatgaaatgacaaaaaagttagtaatttaggactaataagggagtaacttagaacttttgaaaactaaattttacgaatattaaattagtatttttattctatcattgacatattgaattggtaatatttgtttaccattgatatataagtacataatttttattattttcctatagtgttaacaaaatcatataagaaacaatttaagaaaaaaatatcattagagttttgttaaataataataatttaaataaaccaatccatttgtcataaaagaattttatttggtcttccttattttttctcatttaagaattttcaaattagtaaccttaatttcttcattcaaaatttcaaaaatcgtgtctaaaactgaggaaaacatcatagatgaaacattttccacctgctctatccaatgccattgaagaatgaaagaatatttgagcatttagaaccctcatagaaatagttactggaaacacatgcttcaacatgaagaaaggttgcaggcttagattagaggtcagctttgactgaattatgtaacttgccgggagagcatatgagtgccaccacagggtatgtaacaacaattcctttcatatttttacttttactttttcttttgccctttggctgtggactttttaaaacatttccttggttgtaaaacgatttcttatttttattaattttttgaatatactgtattttaatttaatgattttttgctgtcaaaaaaaaattaattcagattttaggattaatatttttaatatatagataaataaagaatagcttgcaattcactaattgagtagataaaatatcagaaaacaaaaaaaattttgggactccgaagcttaaatcgcatttttgaggcacttagaggcctcgtttgggaaaaaattttgggcaagtttccttcgggaacttgctagcggcttctcctctcaatttcgagcgtgtggccaccggtttcgcgtcaatcggacgtcccagtcaaaagttatcgccttccgtaattttacgaaaacaccgcgaaaaccctgcacccccatttttccctaccacgtggcgccaccagggcaaacacgccccaaatgggcgtgtttggctgcaccattttgctaattattggaaaaattatccccttttcctaattaaataattaatttgtattatttttaaaaatcagcctaaaatactttgcttggatagtgtattcagaaataattgaacattctaatattttgtacggacgaccatcacagaaatataatatcttaacattcgtggcattcagaaaattatggtgtttgttaaacttggagcaaataataggagtgatctaattggtattacaaattttgctctcttggttttctattttaaaaatatatctttctttcacctttagcactttgaacaaatttggtggaggatgtgtttcgacagcacagtgacacagtcctcgcctcaaagatcttgatttggaatctaggaaagcagaaaaagttggtactttcccattatttttctgggattccatcaaaattcagttttggaattgtagataataataataatgtgtaaaaattcatcttttaacgtgaagtgtttgtttatcatttttttcgtgtgtctatggtggttgctttgactgaaatttgattagtttcaatttgttctcaaagaaaaggtatctggatttttatccgttatcctgaaatagcctattggtgacttattgatcatgagtttgaatccggaaataacctatttgcatatgcaaggataaggctgcttacaatatccctccccttacctacgcatagcgtgaagcctccggacaatggggtacgtagtttttttagtttttttttaatcctgaaatagaaaaatctttaccatgcagcaggatatgaagcagcggggtggttgagaaaaatggttggagttgttgcagctaaagatttgccagcagagccctcagggctcagaggaagagtttaggcttcgtttgagaagtgggattattctctgtattgttattaattaagttcaatcgggaactgtatccaaggtgagttagatcataatttagtttaatttgcaattttactggctcaggttttggttattccgtcattgtatgttacaatgtattcttttaaggttgcggagagtcctgttgattccgcattgatccctgatgcggcaccattaaaggcatatcagtattttgaaagtaaatattataagtaaagcattagatacttgttaactgttttcatttaagtaaccaattcatatcatggtgaattcaattgttaataacaccagatagtcagcacttaattgcagactcttgatagtttaataatgtgttgttgttttggtttctactgagttattggtcatattttagggaggaaaatcatctaggattgtcaattgcatcctggcattgaaacaatatagtgaatgaaaaatgaccggggcaaatggtgtgtagaaatttggcagaaatctcaaatccattgtctctgcaatgaggaaaaactcagccatttactaattccttattatggaattcatcgaacaatgataaatgccccactgctcttaatctgacattgagtctaataaaatggtaggaaaacttgatttatttgcttagcaaaaaaatgaaaacttggtttattttgacttttatacctgctttggacttgtctagttgaacagaaagagtaagtgatgaaatattttattttgttagttgcagtgcggttcccattctttgagtatgattgtacatgcaattctatcagataagaagcagaagtttcaacggtatgggaatatgtagctctgtgtttcacagctgaatttaatcacaactttaataatcaagattcaagttacaccttatagattataagtctgttacattacttgaaactctctgtctctattatgataaaaagcttttgaaaattgtagctttatcatgaaagttggtatgagcttgtttcctcgctgcttaaattaatgggtgtaagaatttttttaattgatgtcatgtgccccttgcttatgatttgatctgcatcacaaaatgtcaaagatcagttctaccattcttacaaatcttggctctagtttttctttctttatttatgatgtcaagtcattgtctaattatgaaaaacaagacaacagaaaatagcttatatagtgttgattactaactaaattaagatcgttgatataatatagtttagcagatttaaaagtgataaagcttagcagagagatcggattcgaccacagagagaggtcatcctccagacttagacaatcctttattcctgttcaaaccagaccaatttatcctatagttggaaagtaaggaccaggaggaccaaactttcggcagttggaccaattaagaatgttatcaatttgttttaaatattaggatgcaatcattattctagtacactttggctctatttataagtacaacactaaaaacttaagtgatgttagtgtaacatttatttctttgttctcagattaagcacgctttctgctcttctagcattcattcatgatgatgaaccaagaaagactggaatccaaagccaggagtaaactcttttggaagttcaagaaggaacacaaagctatgggcaacaaatttgcactacttgaaaatgaaaatgtttctccggtaaaaatagtgacacaaccagctcttggaaaaatcaatgtggtggaattgattgagaaattcaacactcaatctgatgagtttatatcaaagaaagcatcacgactttgatttgtactaatgacttaaactctgcttcaagtagcacaaagatatttgcctgcgtattatatgatacattattacataaaatagacaacaattcttgccgtataaatttcttgattactatgtaacaccacaatttccttcctaacatgcataacataaaaagtaagagcataagccactaacttgaaccctagtggtaaacaggcctggccctggggcaggacgagcagggcgcccgcccagggtccaaaattttttacactgataatttaagtaaaaaaaattaaaaaataaaaacaaaacttacattagaggtccattttgtgtgttagaggccaattttttcatcctttagttttaatattatttgtatttcaaaaaatttgtgtgttaggggcccatttttttcatcccttaattttaatattatttgtattcaaaaaatttgtgtgttaggggtccatttttttcacttcatcctgggccaaagaattttcaagacaaaggagtttagcaaataggttaaaaacttttagattgtattgtaccgaagaagataaaaaggagaacaaacagatctaatatgtgtactgaattctcagttaattaattcaaatgttgaagaattagataagagtggttcttaagtctcgtctcaatgaattgcagaaacttgaagatagattgttaatcagaaggctcgtgatttgggtttttgcttcttattgttgtcactagtccttatcatttatgagaatctaaaaatagacaaaacctgtttgctttatgataaagtcatgagttagagttaagccaaaattccaaaattccttctaggggaatagctagcagagaatataaaataaataaaaaatgtacgaaccaacagcaatgcacgcaaatgcacgggttacttagtagttttcgattataattatatttactattcttgtgcttaattaatttattccagaacttgaacaatcgtttgtatttatctggaaaataatttttttcttcattaccagtcttctacactgaattagaaagatggatatatatatatatatatatatatatatatatatatatatatattgtaagttttttacttttcggaaacaactgtcttcggttctttagatcaactacatatgtataaagacctaaacttaaaagtgacatcacccaggagtcactccagataaaagttttgagtgacctcatattgtcacgtatgaattgttgaggatcaaagcaaacatataaaacgagaagggacgtagaagaaaattcatgcttgtatttctaatttcttgttatcctatgtataaaaagaagaatacttcaaattagaattaattggttcaggaaatatatgcaaacaataccatcatcatttgcaaattgttgggctgtagatttaattttatgacaaaatgtcttttagaaaggtagaaatcaatatttggaaggtttaaatacatttgcatttttttttttcattttcttccccacaatttttatttattttaatctttgcaaaatatttatttttgtacttaaagcattttagataatatttttttcattgttcttaacactatctaaaatatttttaaagatgaaaaacaaaataaacacattttacaaggactaaaaagaaaaaaaagttataaaaataaaaaaaaatgttaaattatgataacaaaaagtatatttaactctgtttgaaaagggttattacctttgaaaatatttagaactagatagtgattttggtggatcttaatcttttttgttaaagttagctttcgaaaattctctaaaaaaattatgtctttgaaatctcttttgactttttcccttcttaattgcaaatatctgttccattccaatccatatatgtatgtaatagtcaaagttgtgcccactcttgtagactttactccgttgttgccctcaaagctaacatcgattcaaaattcttgtcattggcatttcaccttcctcgattaattaacatttgtcctttggaggcccctaaataaattgatatgtatcatctggtcaaaaacttgtaagctttaattttatttttaagacacacaccacacacacacacacacacacacacacacatatatatatatatatgtgcacttcataatggaaatatttgacttgactccagcagccaaagttcaatttacacaatgaggtcacaaaaattaatataaatacatggaaaggaggaaaataataatttacacgttataagaaggttcccaagttttcaagtgttgcacacagactaataatggatgtgtccaagttacataactctgatgatgatgatgacaagaaaaaagaagttgtgcttcctgggtttagattccatccaacagatgaagagcttgtggggttttatctgagacgaaaggtggagaagaagcctctgagaattgaactcatcaaacagattgacatctacaaatatgatccatgggatcttccaagtaagattagcttcctctttaatatatggtatcagtcactgaaagtgaaacctattttttgtttctgctgcagtagataaatttcatgagtttggttatgattcttgatatatataattcaataattaaggactagagtgtttgatatatatatatatatatatatatatatatatatatataaattgaatgaaacaagctaggataattaattaagcttaactaaagaaagctatatatatatatatatatatattgtgttggagaagtgtatgtatagataaacttaactagcacatcttaattattaattatatggataacaaaagactaattaaatggctcaattgatacttaacattttgggaagttttcatgtgaagatgtagaaactcgggcttcaataatatgttattggataaaatataaattgaaaatgaagacagagttggtgtatacacgcatgatatatatacatttagctggttttcaattctaggctagctagttaggtatgcaactagctagccaccccattttgattttatacatttatggtatggattatttcatgatttctaatctcaagtaattttatgtatgctgataactaattaatgtatgaagaagtgagtgcagtgggggaaaaggaatggtacttcttttgcataagagggagaaaatacaggaacagcataaggcctaatagagtgacaggttctggattttggaaagccacaggaattgacaagcctatatactgtgttaaagaaccccatgaatgcattggtctaaagaaatcattggtctactatcgtggaagtgctggtaaaggcaccaaaactgattggatgatgcacgagtttcgcctcccacccaatggaaaaactagcaataatccacaagctaatgatgccaatgatgttcaagaagctgtaagtcaattattatatatgttactcgatctttgtttcgttaatatctatgcatcgttagcctacaaaattttacatatataattaaccaatctgatcataactaataaatgacttttacaatactttataaaaatcaataatttaccatatataataataataatttataattgaatgatacagtataaaaaatctttacataagtgcatacactattttttataatctaataagacagtacgtttgaaatttcttttttatgttgcatgtatttaaaagaagtataaaatattaatttgtaataggaaataaaccatctagaacagcatgtaaagaaaaatctgagataacatagtcaaacgaccacaacagtttctgagattcggggttagaatcttgttcatactcaagaagaccactaacaaacaattgtacttataaattatattctaaagtcataagcacgtttattagaccccaaaagggagaaatgcatatagataaagacacatgaaccaatttatttattaaataatcacatcaactcttctaggctgaaataatttagcaaagaaggacagacactttcaaataataattgtgttgtaccgtagctgtatacgtaaccatgtcgaatattgtattaatatttttaattgtaatattgtattttttaaaattttttcaaacttgtgtacttatcacaacaattagatgattttttgtattatattttattatgttcataatgatttgtattcatttttaaaacatggattttttttctcgtgatttaaatcattactttatattaactttatattaatttacatactatattatagctgcaacgttttctgtaattttcaaatttttttatgttatgtattttatgcatatatatcccgaattgtatctatacttcctagtagttaattagccttccttatgattttagacctaaacttaaaattaaggtagttacttcacctaatattttgttactaaaaaatatttataaataatcttgggtctcaaacttctagcacacatggcatgtacaatgcatgaaatacccagaaattttggctccactgcctatatgtcaggatacgggtgttgcactttcttgtacagcaaattaagtttatactatttgcctattagctaaaaaaattaaaatatatgttatgtatgcttggaatatcttgttttataattaatatattataatgaagttttagttaagctaaaatccctaaactttcatttatagaattaaataaatacaattaacatattaaaattcataacatatatgttggttcctatatatgttcagtctagtctaatttgtgttctgatgacacgtttcttaggtcattggctcgtcaagctcttttgaattgaccgaatgggatttaatagtaattaaagaaaggagaaaacaatcaaattaatagtacactatcatttaaccatataacttaaattagtaaaaaaatgtaattatcaaaaaaaaattgtagaaaaattaatgatcgtgtaaaaacctttatttattttttgacagggtaaaaacctttattatgaactagtgaactacatatcaaattagttatttttagaagtactacatatcaaattagtaatttccattgttggtttcccgttcaattataccaaagcattgatggacaaaacgaaaaaataaaaagtagtagtacctaacattgtgctatattaatatactaaacgatggtttacgtaacaagaaatctcgcaactaattaaatattgtatacacttcgacaattttgtgtggttctcatctcagcgttacataaattgcatttatttcattttgtggcatcacttaatgcgatcaaccatgtcaactctagcattctgtctcttttgtttaatttgcaagtttttaagtgtcttaatttttttatgtctttttatttatggggttcgcaggaagtgtggacgctatgccgaatattcaaacgagtcccaacttacaagaagtacacaccaaatttgaaagacttggcagcaccaatcactgagccaaatcaccccacaaattcttcaagttccaaaacatgcagcttagaatctgacaactgcaagccatacttgactttcagaaactcatcatccccacaactcattcaacaaaatgaaaagaagccagttattaatggacatgttgacgttgaacgtaaccacttatttctaggtcaattaggcaatgtagctcaggctccaacatccttggcttactcaagtttttggaatcatcgtcagaataataatgtggaatttgctaatgagaattgggatgatctcacatctgtggttcagtttgctattgatccatccagggtttctgatcattgtaaagaattcaatagattttaagagcatttggatgcttaaactactaataacagtaacagttttaatatctctcagtttgaccaaataggagtattttgttattttttctttggcccatttgacaaaatatattattgtatgaacgggttatagttttgatattatttgtcatatatatggtaccctctattcttttttatcaatctcattaggggacaattcttgttcctttttatttgtgtgtctaaatataattaataaagcattgattatttgatttaattaactttacccgtcgtgtataataacaggtgacagtggacatcaataaagtgatgttttaaatatttcaatcaagacataggagtttagcataattatttgatttgaattattataaattttttatacctgtttttgttttctatcgagaaaaaaaaaacttcaatcaaggaaacttagacattattttataaccggattatttatttaaatcttttaattcacaagcagcaatattactagacatatacaaaataaaaaaatgattaaattattaatcttaacattatgtatagttaaatgattgaataaaagaagtaaaaaaagcttaaaataatatatatatatatatatatatatatatattttttaaaacaaataaaatccttataaatataatattacattatataaaatattatctattaaatcaaaagatttcaaaaaacttttattttttaagataatatacgacatattttttcaaaaataacgatgagagactgggggactaagagaggcgaagactccaaaagaaggaaccaaacccgcaacccaacacccacaaaccagagatcatagaattaaaactaaacagtttataccaaaaaacatgagggaccaaaccaacccatgacagagattaccaaaaattaaattcctcgatgaaacctataggaagttttacaagagttgtttctatagagatcatctaaaataaaagaaggggaaaagtcccaccaacaaaaattagaactatacacttcgaaggccgttaacttacctgcataagtgttgtattctctaaaaatatgggagatgcgaaaattcatcttagaagtcgcatataattatatatgcatgcagtttctccatctattacggaggttccaaaggaccaagttaagatacttgaaagcaagagtttccaaagtcgaatcacattctaaccaaaggaaatgccaccctttatcatgcgcaagctcaatggctctcatggctgccagcaactcagaatgatgggaggaggacaccccatagaactcaacaaaagcaccaatgaacataccaagggagttcctaaaaaccacaccatcagctgcccttcctgggttgaatatacgacataaaattgggttgaaataacacaagataacacaaacttgtcctcaaaattcattgggtctaatttaacttttttggatacgttatgatagaacaaaacaaaatcttcattatatttcatttcactcaaattaattaaataaataaataaataatgatataaaaatgtaataaaattcactcactttcataatatttcttccacattttaccaattcaaacgatatccttatatttcattttcatctagacgcatacataacttcgacgtcaacacttataacaacgctccgataaattcgggttggaaatgggaagtgatgtgaaacacctagcaatcccatcaatgctgtctgtttttttttttttttttttggtggaaacaaaatagctgttaatacaatagttatcccagtaaagggcataacttgaggaggaggtgaaaagagggagtgtcaggttgcaatgattctaaagaaagtcacgcaataaagtactacatcaagttattcgtaaaacatttgtgggctttttactagtcaattcttcaatatttatgatactccatcccatgggactcgaaaaagctcagttgtttaattgttgaaggtcctcaattcattgtggataaaaaaagggttttattcgttgattaaatgttacatatcacagatggtttaccggacagctcgtgttgtattacattatatttacatcagaaaaaaggtattcacttttcagggcaggtcataacacagcttgattaggcaatgataaaatgaaaacaatatggtttacacgctcatccaacaaaatggtataattacattgcctaaagttgaaatttgctctatgttgtatacttgtgaataacatatcagggttgatggaaagagttagctccttgttcatggtggtgattggttcctggctggctaaccacaggaatatccaagctgcttccatcagtttcaggagctacttcccttacatcagctatcctcgcctctgtagcctgaatatcactccattcattatccccaactggttgaatgttcacctgatctgttgccatgtggactacattctctgcagggacggggatggctctagaaacactcaggcatgctttatccacattctcttccgtggggtcaacatgctttgtatctgagcatgactctgtcttctcaaaaacttgagttgtatcaatgtgttgcctgttgtaaagaaaaatatctgctgtcaactttggttttatgatgctccacatttcatactgatatacatattcaaactcaatgaaataaaaaggaaaataaaccatcaaaagtctccttccatttccctgtttcaataggtattgatatatactatttccatctttatgtttatgtgggaaaacagaagtagccaacaaatctaatttaacaaaacaaaaagcaagggcaaaagaaaataaggcattagacctttgaagttgggcttttagtacattcacatatgcaagaagctcttccttctcttttaacgctgtggattctctctgaacagcctcccttatcctagtttcagcatttgcttctgcaaccctaaccttttcttctgctcttactacagctgcttctaagataacatcatgctctctagcttttgcaagttcagaacgccacatatttgcttcctgaatagcagcatctctctgcctgattaattgctctctttctttgcttaagcccacaatcttttcttcagactctttcagctacaaaaaaaaaaaaacaatttaagacaagatgaacattcaagacaatttcattgcaagtaatacccatacatagtaatagctaagggtcaattgtcgaaagcagtttaacgagaatcacttgaatttccatcagccaaaaaatattttcaaatgaaccagcacaatggcataccttctgtgtaaacagctcttgctgcttctcagaatctttattcaaacgctcaatttctgcacaagcaattctccgatgctcatccatagtataagcagcagatgctgcagcctcagcagcttcagcagtctcagagagtttatctgctatatcttttatagttgaatcgcgtgctcgaaggtctcgagacaaattctgtagctcctcatccttcactctaagtgtttcctgtattgtggagtagtgatatgctgttagcatatgtagtttttagggtaaattcattaagaaactaagcataaaatatcaaataaatactagaataagtacaaagttcatcattattgtgtttatcactgattttatgcaattttgatgttaggagccaagaaaaggaagaaaagaagcaaaataaagagctaaggatttctgaagtctcgcgccaaccgcgctgatcgcgccagacctactggaagctgacgccagttgcaccagatctcgcgccagtcgcgccagcgacacgggaatttcaaattagcttaaagataacattaaactgaaggctattagggcttttatagtttaagtataaataggaacataatggaaagggaagggacgttcaaaaaagaaaaagaaaagaaggaaaaagaggcatcaccaagatcaagaagaaagaaagaagattcaagaaagatccaagattgaagggtttgcatactcttcttttctaatcttgcttattcttctcactccattgtatagagtcagacataactatgtctagctgattcctctctctttatagttagggccaaaacctaatgagaactcctctgtaattggattgatttctattattatttatgctaatttgtttcattttactctgttttcattaattatatctttattagggctgatcattctaataaagttctgaggattagggtttacaataggaatattggggctttaatgactgacaagagtaaagtaacaatcgtacattacctagggataggatgtatgattgcagaattattaatgtatttcttaatgcttaatttatgagaaattactaaggaattaggattttaaatgaattaaagggttaaagtcactaagggattagggcttactagattaatggaaagatacattgtctaaacatttagaataattaatttagtaattaatccaagtaaaggaagtagggataataaggttaagtgctctgactacaattctttcccataaatcataaaaacataatcaactctatcttttatttcaattgcaatttacttttgtcatttaaattcttcaaaacataatacaaatcataaatcaattaaattttattccttccaatttaaagatagtaattacaataaaattcgtgcctcaatcctcgtggagacgatactctacttatttactttattacttggaacgatcggtacacttgccgattccgcaatacagatatgtgttttccttcactctaagtgtttcctgtagagtggagtagcatcttcagaaccaaaaggcccaagaagacaataaatacccacataaaaacattaaaaaacaaatccattctctatttatatccaccatcctcatttcctcttcaaaatcttggccactacgccccctccccctttaatagatactacaagaggaaaaagtgatattccccaatatactttcttccttttttttgctttcatttctttttctaagcaagtgaacataaatcaaaagtctgcaaacgttagttagccaagtaaacagtgatgaaaagggtagtcctcccctaaccccaaaagcaaaggagtaattcatgcattttcaaacaacaccatgacaaggaaagacaaatttctttgtttaatacatgacaatggcgtacaaagaagccttatcataattcaatttcaaccatattgtgtatcttgccacaaccattattgaatgcattatatacaaagtacgacaattagttcaaagcatcacacaatcaaaattcattaaaaaaaaaaaaaaattaaaatgttatagctagtaactatctagttaagggtgcatttggttaagctttgacaaaaaaaaaaaaaaaaaaaaacacactttaccttctaagaatagtacttaaaaaaaattcctcagagttttagcttattataaaaagtttaattaaactttttatcactgtacatgacacacatgtttaatctagtccttgcacaaaaagaaaagatttccaaatcagtccttgtatataaaaggctacccaaaaaaaaatagtagctataactctgcagttctctgctgcaccatcacaaatgctgaactatacatttgagcacaagaaagacagaataaaccagaactagattgtaccttcatgattgttaaatcatccataggaccatcagtagtcctattattcatcattcccagagcatttcgcaaagaaatctgcattgctgcttcgatttcttttgaacattccaaggctgtcgaattggatgcagcaacaactgttgcaacagttcctaattttgtagacccattcccacttaaggaattcacagcttctttatgcgcttttagaaccaactgagttgcactaatgtcagatgataaaataaatcagacatcaaaataattacagctattagacaggaaatctgaaatagaaatgatccagcaatcattcaaattgattcactgtagcggaaagcaagaacatcagacaaataattatagtaaataataacaaaagtaacataaatataaaggctgaattatgacatgacattagtattctgcaggtctccctttccaagcaaatgcctattcaaatgaatataaaaacacactgttcaaaagagttagaaaattgtgaaggactgcagttatgacttatgaatcctcaataatttgaaacatgacaaagtaaacaaagttttgtaagataatagaaaataaatgataaaactcaaaacaaatgcattagtacatttaggttcaagcatgcagtatttcatttgtaagctacacctctttatacacttttgaaatacaaagggattataacattcatactcatacattcgacaacataaaataaaataaaaaggataagattatattccttggaacttggcccagagggaaatgggagataaaagtgtgggattatattgggaaaaacccaagtctcatatcggtcagatagtgtcaaaatataatatataagtgagggccaaccctcatcccatgatctaacttttggggttgagttaagtccaaactcacattctaagatgtcctagatccattaaaaggtttatccaccatgttacccacacaccaagttcaaaagtgctaagcgtgagggggtgtagggaaaaacccaagtctcacattggtcaaagataatgtcaaaatataacatataagtgaggggcaatcctcacaccatgagctaactttttgggttgaattaggttcaaacctacattctaagattataaaacttactgtaaagttgacacccatgctctagctacaccaggagtctccgcacagaggaagtaatcctttttctgtggtgtcccaatatctaaagaagccaattaaggtaacaagcagagtgacttccatcaatttgctgcaaaatgatgattcataagtagtaaatgcgataaaaaggatacaaaagcagcacccatcgtactttggaagtccgctgtaatacacagaagtaaataaacaaccatgtcaatataagaaaattcatgcaacaaaacttcataaaaacatctggaaactaggcaaaataagcttatgttaaaaacaccaatcttactggaaattcacaggagatatggtgatggtgctattggcatcaaatataatcgttcctttaacagaaggttcatttcgtcttatcctaaggtaaggaaaacattcaaaacaatacagaagatcagtaatcaaagtgattttccgtttccccacacaaacagaaaccaatatgcaaacacatacttgtattccattctccccgttgtcgggtccaagatgacccaacgctcgttccattttctcagctgtgaacacaaaagcgattcttacatgaactagctttttttctttttctttctaaaagcatcaatcaataacatttggctattcaaacgattataaaacacgtaacaaaacagaacgcattggaattataacagaacatcgaataagaaattaaaaattggaattgggagaagaaaaagagtaaaggcgaaaataaagtgaaattgaagtgagaaataggaaataggtattgagataaagggagtgaatgaattacggtttcagatctcttgagaagtggtccttgcaacaggtttctaccggaagcggaagcgagctggcgcttgatcttctccaagctattctcggtgttttctgcagctcgctgtgtcattgcaaattcagctcagtgttattaacaacgattcaaaatacacaacacgcaacgagagtgagaaagagaaggtggcgattgatgagttaccggagaagccatgagcgtagatcaagactttgtcggaagctcaaacacaaagggttttgggtgatattcccccagatttgcgttttcgagtgtttgttttttactttttagaagaaaatattgaaagaagaaaaaaaaaagtttaggaaactaaattatttaatgggaaagaccggtaggttattatttggcatactgacttgcagttgtgcagttagcttcacttttttctgtgttggtcaggattaataattttaataaaattaattttgaataatgaaatacaattaagaatgcatatttaaatttattttgtgaatttaattagaatgataccacagtgtaaatatttattatgcttatcatcgtctgttgtatataattaaaattgttgatttttataataattattttgaaattttacttaaaatgatttataatcagtttataatttaaaaactaaaaaaattaataaaaaaagtttatattgtaaaaagcctttaactaagagtgtatcaaaattaaacactaattttatattaaaaaaacatgattttaagttttttaaacattttcaatgtatatatttttacactattaattaaagtaagagtttgcattgataatatcaataattttacatcacttgacacttcttgttctcagtttggctttctattaataatacatcacttggcttataaaaaaatataaagatttttatatcatcaataaactagtattttaacatgggtgggaaaaatattatttcatataactagtttataataaataataacttttaaatgtataaattatgttatattatatgttataaataaaattcataattaatgaatagttttaaacatataaagtatattttaaatttgtaataaataatttatactgtgatatagaaatattttgaattattgatcatttttataaaaaattgaaatttaatttaaaaataaaaacaacaataatattttgaaacaaataagatgttaaaaataattcttaaaaacatttttattgaagaaaaactcctagaaacactttcgaaaaatttgaagaatagatcttccacccatccccttcactttccaccaaccaaacaaagtgtatttttgttttggtaaaattaaattttaggagaaggaaaatgatgttttggtacaagacacaaaaagttttgtgcaaaaatagagaaagagagaaggggaaaaaaaaggtcatacaccttttaatgaataaacaatcaatttagttataaaaaatattactaacattaaggaaactaatttgaagaaatgttcaatactaaaggaactatatagcatgattttcaatgctactcttatctgatctatatgacacggtaggaacaagctcacttgggaaaacaagcgtccaacagcttttcagattattttttaatgctaaacaatatttgtgtgattggactcaaacaaaaggtttcaataattatatatgctaacactaattaaaagactattttttaatgctaaacaatatttgtctgattcgtcaaatgcaacaacattaatgccgccttccatgtagatattaatagcactagttggggcatttgttgtagaggcaaccaaggcaatttcaaagttgcgatttttgacagtgaaggtcagttctttcctattgctgaaagggaggccttggggtcattgaaagccctcaaatgattattggagaatcacttttgtagagtgatttttgaaatggatagtaagctagttgtagataagatctatagtatgacccaagatttttttgacctgtgtcattattcaagagtgcgcatacatactctccctcaatccaaactatttgatctagtttatcaagaggcaaacagactttgtcactcattccattgcaagggtggcaaccgattatgctagtctcacaagttttgaaagtatagatcatgtaacaccccggacgtgttatcattaataatatcataagcgcgctatcagcgttacataaacgcggtgcggaagcgatagaatcgatcctcttgatttcattatgcatggaatataaaactcaacacaaagcatcatagaaaacaagcccctgttgatccagatgaacagaaataaacaaacacaggcagatacacacatctaaatatagagaatcaggaggaaacgtactcttatacaacaacataaactgtacatatacactcaaaacaagaccatattaggtcatacatcatatatgtacaatacaatgggtgtacacttacaccctatctctatacagagtacatgacagagatcaaactaaagactcttctagtcttcatctgcagcccatgaccagctccagcactctcagctagggccttctgccctgaggtatcttctctcctctggaaacacctgaaaaccacaacccacaacaggggtgagacaaacgtctcagtaaactcagggttctgggagatcttcccttaccctggttcacctcaaagcatacacataaaaccaaagcagaaacgagcttaggaaattatcctagctttcataacccattacaggcaacataaccagatactctcagtatcataggtatcacacctcatcctggctctcacagccatctcaaaaccatctaacagagccaagccagaatcatggcttcaatatctcatatcggctcttataatcgtctgacagagatctcacagaggtacctaatcatcagtgtcaatcactagacactgtatataccagagaggcaccgcctccaatgctatatatatatcaagcatggcctgagtccaccactcaggacttcatacacattgcctgaggaatctcttcactcaggacttcacatacactgcctgaggaatctctcaactcaggacttcacatatactgcctgaggaatctctcaactcaggacttcacacaacatatgcctgaaagagatcatctcacatcggaggcactcatctttcaggacttccagatccactgcctgagagagatcatctcacaacggaggcactcatccctcaggacttctaatcacggtctgagagagatcatctcacacaggaggcactccatccctcagactatcaatctctcacctgagagagatcatctcacaacggaggcactctatccctcagggtcatcaaccacatgcctaagagagatcatctcacacaggaggcactcaatctcttaggactttcaatcacataccatctgtcctaccaccataggactctattctactggccagagaatctcagaactcagacactatcacagtgtctatttatcctcaacacagaccaccaccatggtctttatcaatctccgcataatcacctgaggatactcacgcaggactttcatcatctctgcctaaggaggaacatccatacagggcaatccacccttaggtctttagacggagagcagtggcacctcccatggaatctcagctattccagggagtcctcaactcttcctctggctagggaacctcaactagcccaataccatctcagtatcttatagattccatcacagatcattttctgatctgtatctcatcaaagtcatggaacacctcacagtgttcctacatctcaggcccaaggccacacctgaagccacaggtgtcaaataccctcacactttctcagtgtctatcctagggttcatcaattcagcccagcacacactaggctatcatacattcatataatgacaccatcccggtgtccagtccatcttacatcagaattaggccacaatggccttacacagcaatctatacatatacatatcaattacatggagtataatcatcacccacttgggtggcaaacaagcataagggctaattcccagaacgatgagcttacctgttaagctgtgcctgcagctccaacctcagatgatggtctgcttctctgacacccaccgtgtcaagccctattaaggcatgcaaacacacatatcacagaccatccaagcatataagcatgcataagctcattaagcagtcaccaactgcctctgagaaaggaacctcagtcctttccaacaacccaggttatctaacctaaggttctcaggctcatccatcaaaatcctgtccatagatcctcagtggtctatcacagatccaccatggctgcagagtcattccagactcaccaatagccatctacaacgggcatcacagcccacactacccaataacacagaaattccatagggcttgaacggtctaatcacaagacaccgttcccaaggcctcacaggcacctcaagcccaacaacatggctcttgcatgtctcaattcaagtgactcagtctaagtcacacatgcacaacctagagccaaaaccaaagttcaccaaatcacaaactaaaagctaattcttcctcctctcatcattctaaacacatctctcaactggacccagagctaattctagctctaccaaaagtgggtcactattcatcagaatccccaattcacaaattaaacggtgaaactcgagtttcttacctcaaagatgacaaggaaggcctttggaccacctctcctagtctgggtgtccgtgaatcgccgctgttcctagccaaactcgagttctacagatttcccttgagaaagggatttctctgattgaggggttttaaggaaaaagaggaaggattatagctcacaacgtgtttcccacaatattagaggttaaagggctgagttttggtgaactaagatgaagaaatgaagcttggagcctcatccatggcagaaatggcaaaggaagaggaagagaaacagtttttctctcccaaaacgcgaaaatagccttttatagggcctctgtacgcgttcccgcactaatagcgccacaccccacgctaatcgcgccaccaattcgaaagaaatggctttctggagcattctggcgctaaccgcgccatatctggcgctaatcgcgccactctggcgcacctcccacgctaacagcgccagtttccacactaacggcgccactcactggccgtcgctagatccatcgcaaaatccgtcgctaattccgtcgctaacacttttgcgacataattttctgaaaatataaacttttctcttcctttttcttttattaagccaaggttattatagatcaattacctttttgtattcaacaggtgatcatcaatggaagttcttaagtttgcttttgaaaaaaagggagtacttgtataatttcaatagtttaacactatttaagagagaggatgatacttcaaaaacaaagtaaatggtttattttgctttttattttcttacttaatgagtgggatttttaacgatataaagatcttattctcgataaaattgatttacttttgttaataattcacaatagatttgttttggttttgggtcagagatcaagggtgtccctcaaagagactaataattgttgtcgttgaaacaagaaattgtacacataatgagaatcaaacatatattataccgttaaatggatcatcccactcatgtcatgtgaatgtagcatgacttataccattatacccatagttgtaaaacctggttcggtcattgactcgattgagatagtggaccaatggtccaatcggtggaccaatggtccaatcggtggaccatggctctggtttgaccgggcatatattaaaatttaaaattatatatgtatctattatatataagtatataactaatattatttctgagtaagaaagatccatattcaaaaattcaaattaaaaaaaaatccaattttttcaaaaaaaaaatccattgttttttaaactagctggatcggaccgattcaactgagatctggtgaccaaccgaccggatttaactggaccaatccagatcaactgcataaccagtcctaaagcgaaactgacccgattatgttactagttttcgatctgacctattcgaccgaccactctggaccaatatttataacactcattgcaccaaccttttttggttacaattctcattagattattagattgttagtgtatataaaaaaaaatcaattttatataaaaaaatctaacttaaaatatattttaaatttcttatttttttattaaaatttgctttcatcctttacttttaaaaatcttttatctctcaaatttaagtcaatattattcttccaaaataatgacaaatgagtaaaaatatagtttagcagaaaacgtattatttttttctttctgaaaatcaatatttttcccacctttctctttttcctattcagtctttcattttttatttttttattgagccataatacagggagtggatgtacgtgtatcatgtgtacttctgaatttaaatacagagtatcatttttcagttggcgctttttcattgtaaaagcaaaaaccaaaccctagacaaacgtccacttacagtctcaaattaattgacagcaatactgatccaagtcctgctccttcatccttcacttcactgatcaggcatcgaatcgaagtgaacatcactgtactcaagttgcacaatcagctcagcattttgtcaaacagaaagcaggcgacgataactaatgggtgggatattgaagcaaccgggcgcgtttgcaatcacaccgcacaaagtatcactctgcatacttcttaagatctacgctccacccgctcagatatcggtccccttccctttcgcttccgttgctcagcacaatcgccttggcttgttcttattagccctcaccaaggtcaccacttttttttctttcattctggacaaatgaaattgcatttcaatcaattctaccattttgaatttgaatttgaatttgaacttatcacactctggaaggaggaatttttggtttagtcgtatcgcaggcagcttgtgctaaatagtgctcgttttttttccttagcttctcgccttgtctgttttctcttaccgggttctcagtaaatacttgtagcagaagaaattaagaaggtagaatgaattatacttttcccaaaggttaaaattattatgcattggctaagttatataagctctctcatttagcttctccaaagtccaaaagctaataattttaacttataagctaatcttaacttatgggagaagcttaattcatcttaccttcttactttctcttattgaagagtctattcaaataggatcttagttatcttagggcgtagtgccagtggaatgggcatgctattttaatcgttttttagcattcccatattctttggggttttttactaattcagtgttcgatcacacattttcttcatactggtgtgttgaaaatgttgttaataatgcagtcctgcgattatatcttggagccaaaattggatgaactcatccatcaattgagaatgatgagccagaactgggaggcttcctgggttattgatcagttgatgagcagactatcatctctgtcatcacctgatgatttgtttaatttttttagcgatatacgaggtgagttgatcagctttaatatttgctagcctttgaccttttttttttatatgttctgtcttgtttgattctgatagaaactggaccaggcttctattagattccgtcttttatcctttttattttacttgcaagttgcagcgcatttggttattgcttatacgttagatcaaattttcatatttactgatagtaaaatgtggttcaggaatacttgggggtcctgattcaggtgctgtggaagatgaccaggttattttggacatgaacagtaacctggggatatttcttcggcgttgtgttcttgcttttaacttgctatcgtttgaggtatgatgttttctgcattcttaagatggtttaaattgatcattgtttgaatatttatatgatcattatccatgtcaaaaaaaaaatggggggaggtgaagttgtcttctttgaagctccataatattgctaggtgcttcgaacaaagtattgttgtctgaagtaaactctaaatgatacctttgaatgagtttacattgatattactaaaattcgtggagtggggctcagcacctattatcctttgttttcatgatgagcatgttgctattaggagtttaatatacaattttgagtctctggttaatttttttttcttactcttttctcatatgcttagtttatatgtgtaattttcacttttcctctttaaaatgaaatcttatcctcctcataacctctaatttgggtgtccagggtgtatctcatctcttgacaaacctcgggatctattgtaaagaagaattctcaaattgtcctgcctatgaagaacacggtttagatgattctagtagtaatctggagacatattcagaatatgagaatatggacctggagaactttgtctatgaaaaggtttcagaagaaattgaagcaagaaaggaggctagtgaaattgttccattccatcttcatacacccaacactcttctgagtttagttgatggtataaggatctaatttaattgggctgctcttttagtgttttctgtagttttgaaagcacttgaaaaatctagaccaggatatttaaccaattttccaaatctgttttctgtttctacacttgtttatcctgcacttctcttttgggttttctctgtttatgccttgctcttggaaacactgtttgacacaatgacataacttccctgataatgttggaactcacatgcacagatattgatgtgcctgctgattcagtatccaaacagagtgagaaagttagagtagctagtccttatggggacccttcaagtaacatgctgcgagatgttgatcacagcagtgcggtatttctgcggacaaactggcaggtacaagggtacttgcaggagcaagctgataccattgaaaagtaacaacttgtaaacttagaacttcactgattttttttttttttttaaattaactgtaacagtgcatgtaattatattaaatttaaagttttattcatatattgcaggaatggtagtgctgtatctttcaatgggcttgaaatcattctacggcaactacaaaagttggcacctgaacttcatcgggtaagtttattagatttttttaatactattccttcaatatattagatttttttcatttttgccgagattttgacttcaatccaggttcactttttgagctacttgaatggtctttctcatgatgattatatttctgctttggagaatcttcattgctattttgattacaggtaattgagcggttatttctttattcaatctctttgacggcattgccaatgtttgggttcatttgatgactaattacatataaagcaagcagaaataatgcatcattcatttgtggcagttcattgtcaattgatattcattgctacctcaataaccacaattgactctcatcccacaaaattgttgacattgctagtctgtttgcgtgctactgaaggccattattgtcttgcctgcattctacttttttctaataaccttattctctttatcttcaatttgacattaattcattaaagtttccctacataaattgtaaaccttttccttcatccatagattttgtcttttgctttgattatagatctcaaaattatatttgtcctgtgcccatacccttaagggtttagtgacttaatagccaataaaaaggatagagaacattatgttctgcaactgaacttgtctgttatttgttggacaaaagtgcagggactgaaggatttgattatattccttcagttagtggtagtggctttggaagatatgaaattggattattatgtttggggatgatgcattttcactttgggcatccaaagctggctttagaggtaaatttttttagcattttgattttgatacgtgctcagcattctaccttttctaatcctcaaggcttctataatttgtattattttgtactccactaatcattaagctaatataatactatacatttttttggtgtcacttatattggtttgttatgtttaggttttgtcggaggcggttcgtgtttctcagcaggtaatcatataaaaataagctttatttattaaataaaattgtgaacatgtattcaccaattatttgcaaaacctaagctgacaacaaatgtttgcctgtgcatgctatgctacaaggggtacctggcaacataaatgttgttggcaaatatttccatatgttgtgctgtaaaaactgacaattttcatttgtgcagcaaagtaatgatacctgtcttgcatatactttagcagctatttcaaacttgctgtttgaaaatggcatcccaagtacagctgcgacactaggatcgtcatactcaccttttacaagtataggtatttcgctttctgttcagcaacaattgtttgttctcttgagaggttctttaaagagagcagaaagtttaaagttaaaacggttggtggcttccaatcatctggcaatggccaaatttgatctaacggtaatgaaattttctgactactttaaactaaacattctctttatactgctagtactttttctttatgaatcctaagcaataatgtaaaatctttgttgtggctttagcttcttaaaatattcaagcctcaaatatattgacctgttagtataagaatataggagagacatggaattgtgcaaattccagataatcaagttcatgagttacactgtggaacgtgagaaagagttatagtgagttgattaagattagacctgcatttgagagtgattgggtttatgccagggaggtcaaccatgaaagctttatgtctactgcaggatgtgatgtatctatactgaaggaaacaaaaagatccttgcatagtcatcattgagatagatagagtatatgccagtatggcactagaagtcttatggaaggctttagcgaaggattgactttgaatccatattaatgttaaatggattgtaatacagttttgtatgtggtactggactttccttgatatctgattggttagctatttaggattgaaatttgcttaaaatttgatcatgatacatttacttcaatctatcattaagtttgaaccctaccaagcaagaaagcattttttggggtgggaaaaatgtttctctccctgaaaggatcgagagcctaaatctgtcatttgatctatatcttaggtacgaacccagtatttattctctcaagtctcagcacatgctactgttcttgtttctattgctaccatgttgaagttcagagcactgctttgagcattccgggttgcaaacaaacaatcacttttttgggatggaacattaccatatgcgggataaaacataatagggatataagcatatcataataggttacaatttccattattccatcagtttaccttggtattggatgtagttattgggcacattgaatagctagtgccttagtgtatgctttatgcagacaatacatgacagagatggttgtagttgatgaattgagagaaagaatgaattctaaacttgagtcatggagagtagctttggaatgaaaagatttttgggtaagtaggagtgacagagtgagacacaatgtgtggaatacaagttcaatgagactcaacttgagtgaactatttcttgaagatgaaaattagggatcagatagatcatactcgatgttgcatggtttaggtgtgtcttgaaatatgaccgtaattctaataatttttaggatctcatttgttaaagttgaatccatagtccatgtaccttacatatcatcattatttttcttatataacttatttcaagctctaccaacttaaattagatcttaagtcctgttagtgagtaatgaaacttgaaatttgtcttatgccatttacatcatggtaatatcttgattgcagcatgtccagcggcccttgctatcatttggtccaaaaacttccatgaagctcagtacttgcccagttaatgtttgcaaggttgtagaaatctttgtgattattctttggtgacagtttcagaacacaagaattaaattctttgcttaatctattttcttcttatatggctggcaggaaattcggttgagttctcatcttattagtgattttagctatgagagttctgcaatgacaattgatggtgcctttagtacagcttggcttaggaatttacaaaagccgacgggttctcttgttttgtgtcaagagaatggatctggcaatagttctaatgcttcccaattcattgcacaaccaacctcaattcctggatctgtgttgcaagtattgggttcgtcttatatacttcgtgcaactgcatgggagttatatggcaggtaaagttgctatttgtgttgagatatgtttatatgaaattatgaattaaggttacactaattattgttctatctttcttttggaaattgccaactaacatggtataattgattaaaattccattgctttaaggctaacctattaataaaagaaaaaaaaaaacttgctgtaacaagctggcatttcttttcttgtattttttttttttttttttttttgctgtttttaaaatgagagtctaacttttactgaattttaatccatatatcaatgttctattatgttaaaaccttgaatgtaactgttatttatttggcaacagcaaccactccttccctttgcaatataattataggttgagacttattggctgtgttagccatatcaattgttgggaaaggtgggaaagattattcatgggtcacaatgcttgaatgtaaaaaatggaagtggggatataaaaatagggccaaaacttggaataaatatataataaagaaactaataaattggaaagatgttacacacaagcacaccctctgctaagaaatgacatagctggttttattggagcatttatgtatgggtgagtgcaagtgtggtaatgaatgcaaaagatgaacaacaatcatggcctgaatgaatttttggaaagacattatccttgcagtctctcttctattgtaactattttcttaatcttggattgattttctgtcaaatgattttctttctcagtacccatcaaaaacattttaatggtattgtgccattctgtgtagttcttcatgtcaagcttctgggaagtgactatttttcctttttatggaaccaaagtttaaaagaggaaaattatccactttaattgaagacaaaatacgagagagagagagagagagagagagagagagagagagagagagagagagagagagagagagagagagagagagagagagattcagacacatacacacacatatctctgtaatttatatttttaaaataaattagcagtcatttctatttataattcatcagtaaaagtaaaacattttagttgctattaaggtcttgcttaccaaacattcagaagcaaatttcacccatttttttctattttagggtttaatcaggtgaactatggttttcaaacacagctggataaatcataagggtacactaggctccatcttgaccaaaattctttaagccctggttgtattttaccaaagttatgtttataaataaaaaggcagattgcatgctttatctttgcagtttttacatatttgttttgttttaattatttttcatcacttggggtgattaaagatatatttcttgtttcatatgcatataatgctaatttttgtggttttttaatatcttgaaagtttgctgtatgtatttcacaatctgatttttttttcttttccaattgtcattagctcaccgctgtctcgcataaatgcgctggtgcatgcaactcgctttgctgatgcatcaaggtagtttctgagctgaatatattacagagatcacattctaagttgttattatcacctttgtttattatgaaaaataactgtatcggcaccattttgttaaaattttctgttgaattatcttttggtttccccagctcatcagatgcagcattagcatatgtaaagctcattcaacatttagcagtatttaaaggatacaaaggtcagattggttgcataaaattgaatagaattccaccattttttaaaatattgtatgtgattgttttcatatttgcatttgttttatcttgtttttgtacttttgctaatagtttgtaagtcgccagagtaactttttataaaaaataatatgataaattcagcttaatggcaattatttgctgtgcaaattgcattttgttaatacagagttgtcattttcttcatcgagattgttgatagtggatagaaatgtccactatcacccattcgagttccttattgttctgacttcttcctttttctctgtttctagaggcctttttcgcccttaaaatagcagaagagaagtttctatctgtctcaaaatcgcaaatcttactgctaaagttgcagctgcttcatgagcatgctttacatcggtaagttacctagttcatttgttgtattaagaatcttgaattgtgttagcatctgcaatttcagctcacttaattgagcatcatgtagtggacaattaaagctagcccagaaactgtgtgatgaacttggtgttttggcatcacgagtaactggtgtagatatggaactaaagacagaagcaagccttcgccatgctcgtacattggttgcagcaaatcaattcagagaggttttttttagtcttcttctatgtactaaatattaaactatatacagaaaatcaatcacacactattcacagttcgattcttgaaattgttcttttgttggaaacatgtatcatttgacaacagcataggatttgtagatttcaagcatgctgtatgcaatgctgttattgttatgtattaaagtacagtatgtggggatcttagcttccttgccccataaggagacaaaagggtgaaatcaatcactgttacctaacagttgaacaattaaaaaatgtatagattgcttttaattttcatataatgattcttttaggcagcttctgtggcacactccctcttctgtatgtgctacaaatacaatcttcaagttgagaatgcttcagttcttcttttacttgctgagattcacaaggtaaattatcatattgtctaacacacttgttagtttcatgtggtgtggatcaactatcaaacacttttatttcattttgctttatctgtatgatcatttttttttcttttctttttatgcttgatctatgtctcatcctaaattaccggcaatctactacattgtcccaaccctagctttcacattgttgtgttctctactgttttttattttttactttaaagccttcattcatttgtttttatcagaaatcaggcaatgcagttcttggtcttccatatgctttagcaagcctctcattttgcctctcatttaacttggaccttctaaaagcttcagccacacttactctagctgagttgtggctctctcttggatcaagccatgcaacaagggctctaaaccttatccatggagctttcccaatgattcttggtcatggtggtttggaactccgctcacgtgcctatattgttgaagcaaaatgctatctgtgtgattcaaacttcaatggtatgtcgctgtaaatagttgatgttagactatgctcttcaaatttgttgtctatccatgtatatttaaacatatgctgtttttgcaagtatttcaatacaatagccgaatttctgattctttaaaagataataatcaaatagggggaaactagtttccccacattttcgtcaatagttttctgagggtgttggtcctttttctatccccttgttggggctttaactgaatcttacttgtctgatttgaatttctttttcagtctttgaaaattatgagattgtgatagattcattgagacaagcatctgaagaactccaacttttggaggtaagcaaactttctgccttttaatattttgagaaatcccttgtgagaggaagaaaaatgagaggtcatgtgaatgaatctgtgtgtcttgactacacagtggaggctcttatttgtaattagaaccacgaatacagtagagaattgtcatataattatactactcataatatccctaatttacaatacttctttaacactatattacataattacaagcttccgaacagttttcattggtcccttttcatttgtaagcctttttgctgcatctctgcctcccgtcaaagttcacttggatacatgattgcatgcatgtgatagatactagagtattgtgtgtgtgtaaagcgtaaaatgaagtagggatgactgttacaatgaaaatccagtgcaaaccaaaagcagaggcatacattatattcgggcatatagatactagataagtgtttatcaaattggttttatggggtcttaatacattcaagatttatgttgtgatggtgaaagctcacaagtcaactagtaaaaaaatttcatagtaaaattgactcatttaacccacattattttaaacaactcttcaacacccaaatccctttctattgctttttatttaagatttgattttcttgcagtttcatgaactggcagctgaagctttctatctgatggccatggtatatgacaaagtggggcaattagaagaaagggaagaagctgcagcttcatttcagaaacatattttggctctccaatcctcaagatgaggatgatcctcttgttagtgtgttttgattgttctttatagtttatacctaattttatctatataagcttatttaattaaatttacgtacaatagtgacccctgatcttctgtaattatcattcaatagctgtagtcattttgtttccaattgtaaccgtagccaagatgtacggtggcataaaccttggagatattttgttctctcttccctttatagaggacaaccgttcatgtaatggacatacgaacgacaattaaattatttatcattttaaaagattagatattttttcttaaattattcttatgtattgaaatctccgctacatggaatgagataatattaattatgaaagtataatatagttaataaaatttatatttctttcaaattaagagtatctaatgatttattttaaaattcttacagaaaatttcaattagacatttgtaccattagagaaaaactgtgggactcatttgtttattagattatttctgctagcaactgactcttttgtacatttcatttttacattcctttcattatgaattattaacagtagatcgcatctcttaaaaaaaaacattagattgcagtattgctttggaaatatggaattataatgttaaaatattttaacgaataacgatgtgtagcttcaagttcaagacacaattttaacgttatacagtgcattaatgtttgaaattttagtgtataaataacgtatttttgataatattttttacacagcaattcttttaatttttcttatcttatttcatttaactgttctcttaaattttcttatctttatttcctttctttttacacacaaatgaatcccaaaaacacattgttgggatttatttgagttcttaactttaggaactaaagtgacatgaatatgtaaatttaaagactaaattgactacttactactaataaaaaaagtacatcggacccaacctacttcaagtcgtccataatattttaattagtacgcgcgaatctttatttgctgaaaagaatagcaacacattaattttttaaaacggcaatctttctataaagagaatatatactaatttactagatgagtatattttaatatattaatatacttcaaaaaatataaatataattcatatttctcaattaattataaaagtactgtattattacttatatgcaaaatattttttattaattagcaaaagaaagacacaaatgggtacccaaaatcatatacagtgccatgtatatagtgtcatatatataccaaatatataataatttaaaaaaaaaaaaaaattctagaagaaaagggtgtgataaagccaagagaagcgtgtgaagaagagagagtcgaatcctacgtggatttgacgtaggttgaatgatgaatgatgaatgtcgaatgtaagtaagagtaacgctgtaggtgtaggtgattgccatgtaataataacaaaaataagagttcgaaacgaggaaaggtagatcaacatcatccaatccatccacgttgaaacagtgtcgtaatctatttccatttcttctctatcttcacttcctcgtcctcgtcctcatcctcatcctcatccacctattctcaacccaaacgcaatgcccactccatcactctccaatcacactcccattccccttatatatcacaaccacccacctcaacctcaacctcagaaccagcaccgcaccaatgccattacccaattccaataccatgtgcaatcaaactgcctttcagctccttggtttcaaaaacttcgtccgaaccaatcctaaatcggaccgctttcaagttaaccgcttccaccacatcgagttctggtgcaccgatgctaccaacgccgcttgccgattctcttggggacttggaatgcctattgtagcaaaatccgatctctccaccggaaaccaaatccacgcctcctacctcctccgctccggcgacctctccttcctcttctccgctccttactctccctctctctccgccgcctccgctggtgcctccaccgccgccattcccactttcgacgccgccacctgccttgccttcgctgccaaacacggcttcggcgtccgcgccatcgccttggaagtcgccgacgcggaagccgccttcagcgccagcgtcgcgaacggcgccgagccggcgtctccgccagtgctcctcgacggccgcaccggcttcgcggaggtgctcctctacggcgacgtggtgctccgctacgtcagctacaaggacgccgcgccgcaggcgccacacgcagatccgtcgcggtggttcctgccgggattcgaggccgcggcgtcgtcgtcgtcgtttccggagctggactacgggatccggcggctggaccacgccgtcgggaacgttccggagctcgcgccggctgtgaggtacctgaaaggcttcaccggattccacgagttcgcggagttcaccgcggaggacgtgggaacgagcgagagcgggttgaactcggtggttctggcgaacaactcggagacggtgttgctgccgctgaacgagccggtttacggaacgaagcggaagagccagattgagacgtatttggaacacaacgaaggtgctggtgtgcagcaccttgcgcttgttactcacgacatcttcaccacactgagagagatgagaaagcgaagtttccttggtggatttgagttcatgccttctcctcctcccacctattacgccaacctccacaagcgcgccgctgatgtgttgaccgttgaccagattaaacactgtgaggagcttgggattcttgttgacagagatgatcagggcactcttcttcagattttcactaagcctgttggcgacaggttcctcattttctgcttctttttatttacatttctcttttttatccctgctaaacaactttattataactcaaatcttcaactatcactgaactaatcactcttaatttacattaaactgttccttttattctcctactttgttagctttttttttttttttttttttaatttgattttcatttttttaaaatttttgttgtacaattatattctattaattaactttcaataattcacaaatgatggtacagtggagtgttatgtcagaatggatgtacttgatgtagcagttcatcagagtgtttcccctctccaaattgtacttatgtccctttcatgagataaaaagtttatgacattgaaaaattgttagataaaattgcaattatatcttgaatttatttatcttccgctttgaactgattgaaagtggtaaaagttagattaacaattttacagttggtgtgttggaggatggtgattagttaaatgtgttttgtgttgaattgacaggccaacgatattcatagagataattcagaggattgggtgcatggtggaggatgaggaagggaaggtgtaccagaagggcgcatgtgggggttttgggaaaggtaatttttccgagcttttcaaatccattgaagaatatgagaagactttggaagctaaaagaactgcgtaagcacattggaagaacacaaatactcctttattgaaatgattaatgaggaatcgatgtggcatagggtgtttatactctataatacataatagaattacaaggatagtgtcttcccttgtatgaaaatgaaatcatagaaacttaaactttgatggatagtatttttctattaaatactttgagagattacttgatttgtttcctctgacggatacgaggcgtccccaaccacaactttatctgcctctctgcttgtgaagtgcactttgggggattccatgagtaactcatcttgaatctctccctgttccacagcatcccactttttgcaacatcatatcagataactgactatgtataacagcataataatatgaaaaggatgaacttttttgagtgtatgagtgaaaggaaacgatacagagaaagaaaatgacagatgtaataaataatataatggaaagaaaaaaaaatgaaagtgaaatgaaaaagataatgagtatatgatgattataactcataataatgtcggtttcatgctatttaacataattttttagaagaaaaaaaagtaagttctattcattaatcgctatccacatgatgttgcgtaagatacgcaccaaactgaagtttaatgcatttaattgcaacaagcaacaatcctaactaaactttctagatgtagtgattcttatgatatcacaagttttcctgacacagaaatgataaggaatatggttttgaaccttgcatagttcaaatgtgtttttgtagtgaatccaagttctcatccaaaggaagagaagctaaatatataacaatgatccaatgtaactcgattttcaactgaattacaatgccacaatatttgttccttcacacaaccatggaagtgtacaataatatggtgctctccaacagcaagacaccctaagatcacaaaattcctgaaggaaaaatttcagcaagtaaaatgagaaaatcctcatttgaagtggcattgtcaaactcagttcctgcagagacaaatcaaagaccattacaccagtagaaaaatctgatacaatatataaaactggatccaagtgagtaggaactgcagtgtttagaccaaaagtcttagatatgtaatgagaagcaatacaatacaagtttcgcttgttaatggttggaatgttgtttacctgaatccactgagtagtagtagtcttcaaaatactgcgggaacttgggttcctggtgaatatttcaactaagagccacacatgacacaaagtatataattttcacattaattttaactagttttgatgctaccaacaatagtgcagagagcttctggtaaatatgctatgaatgggataagtagtcatgactatgactcgttatatatatcacagaaaaaattacaagatttttacaaaacaaataaaatacataattttaaatgatttttccgttgccgggaatcgaacccgggtctcctgggtgaaagccagatatcctaaccgctggacgacaacggatttctgtacgagtaggtgaacaaaatagtaactaatgtttatgcatcataagcttgtaatcttgagtcatgagactatgacagtgcagcagtatttgcatatatttaaggtttttaactcacccttagaatactggaatcgattatgccagtaacatataaaaagtatttggcacaattcatcatgtctatttatttttcttttccatcttttccttttattctttttttttcttttatgaattgaattattgaaattctctcataaatataaaattttaatcagacatgttttgtaatttacccaaaaataatatttttacttatagtactgatatgtcaatttattgttgatattgaatttaattaattaatgaaacagttaaacatttttgtagactaatataagtgtatatttaaattaagaaaaaatattatcaaaagtaaatcaccttaataataaattgtttatgttatctatccaaaaatgttctaattgatcatgataatatataataacagattgttgtttactaggcttgttgtccataaggatatcctttaaataggatgtggattggcatagactgtcataagaaactaggcactagacttgttgtttactctcatatgcagatattaattaattacaagaatatccatgttcccctatgaggaatcctagaggcaccaaattccttctacttagccctaggagtgagtgaacaacgaaagacttgtcagggttgatccctcgaatagttttcttagccttctcaccacttgcatatgtcttaagaagacacaaaataccaacattatattcctccagcacaactttcattaggatgaaaagctttatacctcttgtacccttacaattccaacgaaggacgttcattaagaaaaatggttattagagggttttaagcaataaaggaagacaaaatagctgtattgaggccatgtgtgcctacccttgtgtctctagaattggaggtttccttacgacaaatgagttctcttgggatgagctcgaagtaccctaatgaccctagttgcattgctttaatgaaagcccttgtctccgcattgggaaacaccacgtgagtgataagatttttatccaatttcatggtccccttttggctttcgcggacccattttgttgcatgcaagatgccaatagcttgctcctttttctttctcatatacatggaagtctaggaaacatatcaaccaaagagtaaaacaactaactaacaaaaataaaattattattaatttttataaaacaaaaaatatcacatattttaacaaaaaagttacataaaaggacttaacatataattttctcatttaaagaattttttttcttaatatttatcttaggtctcactccattatcctggttgtccattgaattggaatccacccatagaatacttgcttttgttttgatttcaatgcgcctccattttggtctttacctttggaatcataaataaattttttaacacccgatttgttacctaggtaatccttttccacgaggcatttggggatgttctcccctatgattgtttcaaactttaaacaccatatgtctatcaattgtagaattattctggctatcacatttgcaatgaatacaaaattattatagctatcatttgcaataaacgtgacatcttggtactgattcaattttgaatcttaatctggtttccccttttcgatctgttttttttaggagcttcgcattaatggctttcaaaactttaacattgatttttgtgccccttggtgtcttagacacatttttaccctttttaactaccatccatggaccgtataatcccgccttatcttgaacaaattgattagccacaatttgcgactcattaatttgtttagggcttatatgagtatgattttccttttctccaccttcatagctttcatggtagcttcctgctggtgattgtgttgggacatttaattgttgtttgttcaatccctaatgttgcttcactacattggtgaatccactttcatccctcaaactgttagaaaacaaaagttttttttttttattagatcttttttcttttcattggatcctagcttagatttgtgccaaggttttagacgaaaagaaaataatatattttatctgaatatcatttattagttatttgttgaaaaagtatcttttgaataattgaactccatatacatgtatttaatatatatttctctcttccaattcctataatcttcttgaccatttggaaaattgaaaaaaaaaatagtatttaagtagtatttttaattactttcaatgaaggtagtataatatattttctaaaaatggattggccgggttctttatgatcgtacttgccataattaaaatatattgagtgaagcccttcgtatttcaattttagaatctaacccaagacattgattcacgatatattctagctttcttcctaggtcaatttcaacatagattctgcaaaatctccctctggagtgtataaagttagcatatcgatttttaaaatggttcccagctttggacctgcttaccacataagaacttatcctcatataattcaatggaaagacctagaatgtagatataaacatcaaagtctgctaaatatgatataaccattagaggggtcacttgttttaaggaaatatatgtcatgtaatatataaatgggcatctcttataccctttttggttatataatagtaattttgctgacaaaaaaaaaaaaaaaatccatggtccttcaaataggacatgccattaatccttctttaccgagaactaattaaactagttagtagtagtcttgcgacatattgataatgcgtatagttcccattttagcccattctttgggtagcttgtgttcaatcataattaaaactatctttcttcccaaggcatcaacaatatgagagttcttccggcggtcacaccattattcaaattcttccttcgagataggaattattattggacatagttatagctttgtagcatcattattattgtcatactcctaattaccttgtaacatctaccctatgagtgttacgttccatatcatctacaaagctctggaagtttgccacaatctctttttcagcctctaacaaggtatccaaataggactttggaaccttatctttctacatattgtctttgtagatgccctcagtaataacctcatctatcgtaatcgaaccttccttagtcttaacctttttggtactatagttaaaagagtcttcctcttcttccttagaactcttagcaggaaccctagcatagctcttcacctccctcagtcttatgccttatcctttatagttgtatagatgttttcttggctttcttcttatttttaaatgttttatatagccacattcatggcctaattaagaaaaaaatcattctaacctttattagatcataaccgtaacactttgcagttgcttttcaactatataggtaaattttatttagtttcagaatatataattttgtaacttattaatataaaagtatatgtgtaaaaatttgctggcatttgatccttcccttagatgttattgaatttgcccatgaccgatcttggtttactcgttttatctagggagaaattttcctaatatagtattaaaagactacgtagaactcagttttttttatttatctggattgtttacaaagcactattgaattcgggcatgacaatggatgaaaatcgagtttttgctatatagaatttgtggtctccttaagagaatcaggtcacccgattttccgtcttttgttattttattattattattattttcatagtttgagcgtagacttactcctgcaactgcaaggcgtggtcacttcctttttgaaagctttgttagtatatatcttaactcttgtacacctttagcatagttggagaataactctttcatgtgtaaaaacaattaattaagcataaatgctaaaattcaagggttgctttgaattaattcaataatattagtaataataataatacacaatttttccattttacagtagaagtaatttctttcttgattttaaaaaaaaaaatcttcttaaataattaataattaattagccccgcccaaatcaaataaaagaccgaaaaggaagcataaggaggttacttttctgcgcgtaggcatgcttgctaccccatatgtggttcggaagttgatatataaattagtttattggcatggcaaatcaatttgagagatcgagtatatatctgtcaatatcttagtgattgtgacaaggaccatgaaatacccttatgttttgatcatagaagtatgacttcattattaaaataattgatagattacaaaacaaacctaaccttgtttgatttaaagtccaagctggtgtatgcatgtttcaagctatattaatattgtattataagggatgatgttttcagaaatactataacaatttttttttgactaaattcaaaagtatgtttgattaaattttaatattttttaaaatgtttaaattcaaaataatgaaaataaaatataataatagaaatatatatataaagtataattagatttgaaaataaaaataaaacttttctgtacatatactcttatgatataaattttccatatcttattataggaatataaaaaaaaaagatgttattacttatctgaacataaataatatttaagaatactttaaaaaaatataattaacttgtaaatattacacaccaaaattcatatgcataagaataaatttttaaaccttaataaattcattccttgcattaacaaactcaatacattatcaacatgattaaaataaaattacactctaattctttaagcaaatattttatattaaagcactgtggactaaagaacaaaaaaaaaaaatcactaaaaatatttagttagatttcatgataaaaaatgattattaacaaagtcagttgatacttcatagttatgatatgataaataaaaattcaaccgtcaacaacatcaataataataataataataataataataataataataataataataataataataataataataatctttcgtcactctgtactttctgtatatgtacttgatgaaaattaaatagcgtgactcaagcatgccacttggcagatatattaaatggtaaggaattaaatgccaattgcatgccgcaaggacttatttaggttaattaatctcatccaaccagtgaggagccctatatatattaatacatagtcttctgtaagagaaagcaattgcagggaagatcgatcgaaatggaagaaggtcgcaaagggtatgttccagtgctagtgggcaaagggggacacaacgtggagaagatttgggtatccatcaaagcgattcagcatccagccattgttgagttgcttgatcagtctgcagatgagttgggataccagcaaggactcctcagaatcatatatgatcttcacaacttcaaagccattcttcacaaggcttccaagaattgtatctagcaaattacatccatgatgtcttgtttttcattttctcttaattaggacccattctcaaacatgttaatagaaaataaataatcaattttattacttgctcgctgtgcattcaactttttcttctttttctttctttctttatagtggaaaactaaacacaactccccccccccccccccccccctcttcattttctccaaattattttttcttgctaataacatctacttagaaatctgactatttttaatgaatttttttctcctaattatattttttttccactcaaagacttaaacataagattttactcaaagggtccaaatctaattctactcgaatcataataatgttagaaaagattatgtttatttcaagggatacaatatgttttttaattaattgataatgtaaaaacttatctaccaatttttctagatatatttatatataggtaaactatatttgagaactagtaataaagtatttaatgttataatatgaggagggattaagttaatgtaggtaattttaaaagagatattcttcatttgtgtcttttattttcttttaatgaaagggttctaacaagtaattaatatatatatatatattaaatatgatagataattaattaaatttaactttattcaatacaaaatatttattagatttaaaaaatacaatatatatttattaaatgtatgaattttctcataatttatataagtcttgttaaccattgtccttggggtattggttaagaaaataaaataaaaaatatttagtgtaaaaattataaaagggagcaaaaatgatcatgaacaacacaatttttcatctctcaataaaaatattttcactttaaattttttaactaatatactaattaagataattggttaacattagtatttgtcaatctatacatattaaaaagtattgttaaataaaaagtgaacggttttttatacatttattgttgcatttaataaatacaatgaatctacatattattttattacagtaattaatatatgttaataaatataagacatttaatgagattcaaacgtacatccaattgcatgtgttttagaaacagcacattaacaacttatatatatcttaggtgtatttaagttgtaatttgctaaagtgttccttctcacatgaaataggtgcatttcaaggatttgttgacataaacccatttgttttgttggagtactctagcaaagttcatattgggtgtattttaaggtgatcataattataacttgttaatgttttcattttttaaaaaaaaaatagtaagggtatggttggtaaatttctatgcataaatttatttgatttattaaaacgtatggtattggataatataaatataaaagtttcttgtttcattttaaaaatagataatgagataatacaatcaagtaaaaatgactaggacaaaactatcatattttgttgataaatcatgacaatgttttgtttcaagtataaatacttaaaagataaaaaaatacttattttacttctcatttaataattatatttttttatttcttatctcctccctcatagttatcaatgttgtcggcatcatcgttattattattacatttttttattattaccaccaaatcatcgcactcattggcaccagtattattactattgtcttcattttcattatcattatcatctttattattcacaccacctccatagttatgcacttgttttggttattctcattgtggttgtttttactactatcattattattgttattattttcattatggcctttttgttgctaccaccctcaccatacctgtgtcatattaatataattaatatgaaatatattgaaacaattaatattagtaaaggaattacgataatatgcttgttaaaataaaaaaatgtattaatacctaaatagtacagatattaacagagtacttaatatagccaaataatccgaccaatatgatgatacattatgaatggcttgcaccaaattaacccgtcatatatatatatatatatatatatatatatacatttttgtttcaaagtttcaattaattaaaattaggattctcattagttatttctagacatcgcgtgtattcatttgtcttcaaaaagtcaatatcaaaactcacttgtagaatccacaatagaggatttggttctaaatcttaattagatattcatttagaataaaaaaaggaaacatctgatcagttaacatatccgaaataaaattcactgaccaatatttgattcaaattcgttatctataacttagggcattttaattatttaatatagatatgtcatatatattcctttttaatgtggcatggctattaaaaattttgagcagcacattaatcaccgagagaaggtgacacagaaggaagaaaagtccattgattaagttagggaggaaaactgaccaaacagaagaagattgagggccttggtttttgatatgttagagcctagaatcactaggtcgtcggcttagtggtggagggcttggacctttgaaataatatgtctgaggtcatagatttaaacatcagtacgatcattgtaaaaaaaagaagatatgttagaaccttcaacatgctcacgaggaaacttgacatggtttttgaaccgaagcttgctgcagaattttatttgatcaccaatgtgatttttgagtctgattgctttcagcttgtgaatagcaggaatagtccaaatacaaattaaataacaaaagttattttgcaggaattgttgcagattgcaagtatcttagtaatagtgccttgatataaaaaagaagaagaaagtaatagtgccttagtttttacaaaaagaaggggaataaagtggcacatgaattagccaaattggctttcaattgggagatacattttgggtagatgaggtcccaaaacaattggaccttttagttttatcttatgtacgtacagcttttatcctctgatttataataatatattcctattctctcttcaaaaaaaaaaaaaacaccgagagcaataatatccaactttgacggcatgcatgattttgttgattaggaagtagtttgcacggctcaaactactaaaccaggtaggatttttaattatactttttcttataaaacttggcatttccactttcattgtgatataaatattcccaatatcactgttgtttctgctccagatcgaaagaaggccatactgatcagtttatcaatttgatgctcaaccgtactggttgtcctatccatatgggatcttttatatcaattgatttaataaaggaaaaaagaaaagcacaatgatcaaaagagatttataacactcatagatatttgttaaaacaaaactacgccttctgtgtggactttatcaacatttctattaagtttatactcttgcaagaaagagaaaaaaaactaagtgaaatgagtataaaatattacgcaaccgtacgtgcatattgatatagctacatgtgtgtgtgaccgatcatcccagacacacacatctatatatactctaatatatatgtaatatgcccctgaaaccctagatttggaagtaatttgtggctagaacaatgttttttagttttaatgtataatttttaacaaatcagtaaataaaaatcttatttaatattaaaattaactaataaaatattaattaaaagtataatatttaactgaattttaaaaaatttaaaagtatattatttaaatattaattataaaatataagaaatacgaaattttatatttacattttatgataggtgttaatttgtttagggatgggataagttaggtatgataccatttttttgcgaataattatccaaaccaaaattcgacccttattaattacataaataaaaatcctgtttttattattattgaacataatgaaaataatatatatttttacataattaaaataatatcttattatttaataaaattggtttccatgaaaatgaacaaacttgataaaaacagattttaacattaaatttattatttacatatttttataattgttctattttatttaagattattctataattgctgcgtttatgtattaaaaataaatcaagagtcttaattatttaattagttataaataaatataaaggtaaaattataacagtacctacttgcaatttctcgtacacacaaaccttaaacaaagatttatatgtaagaaaaggatttgcattaaattcacctaaccatcctcttttattaaacgaagatcaaatgaagatttctccgttatgagacaacagatacttaaagaaagatagggcctatataaacaagaaggtttgaagactgaagcaattgatctcacacaaatttttttattcttttctccttcaacaagactctctttatattatattgtaagattaaaaaaaaaaaaactctcaaaacaccttgaatatcatgagagaaaaagactaagtgttgtttttatttatgcgtctataagacgattctattttagtcttcgaacaatcttcgatcataaattttttctgatttgtttacagccaacaataacttaataaaacaaagaatattgggtgttgatcaaacttgggatagagtttaatttgtaagagaccgaatacttgtaacttgtgaaaagttaatagaacttggtagtttaccaagaactgaatcagtagtagagattaactaatataactttatgcctgtatatctttacttttctatttgttttcttgcttttaattaattgagtttgaattatgattaactaatataactttatgccagtgtatctttacttttctatttgttttctgcttttaattaattgagtttgaattattttttagttgtttaaggagttataattagtttataattgttctgttctattttattatttaagaaaattagtttccattacaagaaaaatatgtattaaaaagttaaataataacaatccatatataaatattatatgtgagtattaatatgttaattttaaaaatattttaagataaaaaaataaaaaaggcatttgaaaaagggttcaaactgattttctttattttttataattagataatgtgagaatttaatttaaaaatgtacttcaaactgtaagtatttaaagattttgtctatcattagtgttatgactatcagatttaatgcattatctttaattctctttcatatcatatatatttttcttatgcataaaattaaaactttataattattaattaaaagaaataattaaaattataataaaatacatgaatatatgtaataaaattataaaatattaaaatcttaataattagtattttaattatttataaagaaaactatgttctttattcactttaggtaaatagttatcataaaaaaactttaggtaaatagttttcatatattttaattttagaaagaaaaaaaatttaatttattgaaatatataaaacttaactttatctatatgcaaaatgagattacctaaagttttttttatatatttcaatcaattttaaaaatgtagattacttttttaaagttaaaataaatgaaaattagttatctaaagtgaataaaaaatatagatttttataattaattaaaaataattattaaaatttcaatattttataacttgtttacatatatttatgtattttaatataattttaattaataattataaatttttaatcttacacataaataaaattaatgtaatacattaaatatgatagttataacattaatgataaaattgaaaacttaagataattgtgtaatttctattgctcatcaaagacggagttgcttaaccccattttcatttggggtcagttaaagaaatcctttttttaattacataaaacatcttgtatatggggttaattaaccccaaatttcacttggaatatgttacaaatccctttaaaaaattattgtgaatgacacagtgagatcgtcactaaattggaaaaagaaatacattcacgataaagttatctatagttattcatggttttttaatttttaaagcagaattgtttatattagaataggcgtaaatgcaatacaactttatacatcatgtaaatgttctttactatatatgtgtctggtttttatttatggaagcatttctcctaaaccgaagacccgtagaagagcagaaaggagataaaggaaaccaaacaagtcacgaggtgggatatattactggaaaatgacaatcatatctaatagcatacgttgcaccaaactaagatgccaaagaaatacacgtaacatgatattctagtaaatgtggcaatcaaactcccaccatggcatagcaattagctagacgacaaccacacactctctaaatatgtacctacatttagatattgttggccaaatattatttattagaggcatatcctttgctttggttttgccttctccatccatggcaatgaaaatcgtgaaccacgaaacctttcatacctgcctcttgtcacttcctgtgactgattaatgccgtattctagtagataagtacatctacacatttagaaccttctcatcttaattggtatgttcagtccccttttcaatttgcatcagcatttgattccgcaatattaggtaaatgtaattttcatgtcatggccacttttaccgcctgcttatcattgttgggtgtgtatatatatgtgtaacatatatacatcctttcaaaatatgtaagataataaccttctcattttgtaaaccagttaattgcctcattttcctctgcttcattccccactcttccatatatatatatatatattatggccttatatgacaacaatgatatgaacttagaagagatagatttggaggtctttgaaattgatgcggccatcctaagagaattgctagaagaagatcaagagggcaaggatgataataaggatcatggtaaagtagaatgcatagtagaatccgtagaagaaaacaatgctcatcctgacatgatagatagggagcaagaacagaagcagcagcagcagcagcagcagcagaactgtttggagaagtatgggtgccatgactttgagtggctcaatatgatggagccaactaatccactgaatgatgtgagaatgaattggttttcagatgacattgttgggatggtggattttggttatgctaatgaagaatgttactctcaaatttgtgatgggcttgtctctaatgaggcaagttatggttttctgtgggaagattatgatatttaggtgcatattaaagtttacctttagctagctctagaagagaagaggggaaaaggggctaaaatagctcatgtgtgaaagaatctggttagtaattcgtaaattgaagaccaagttagcagaactacatgtgtaaatgctgtttgggtcaaattctattaagacataagtgaaagaaaaagagttataataattagtttaaagagtcgatttccaaattacttgcagcatgtctacgttaattaattatccatttatgctttccttattttttccatctctttcattctatattctgcatgatagttgagaaataagatgaatgcttacaaagtaatagtaaaatagagggaccttgctttgatgcctcattcaggacaatatctacatattaggacctatttggctatgtagaattgataatgtgataactatatgaatcaggattattcagtggttcaaagggatgagtcaacctctagtatcaggaagtttagaacaaactcatgcatagtcaatcaattggattaaatctctgaatggattaaacctctgaattgattactcaattacatcattgtaaggttgcataaatgcctattttgtgattttttttaatggttttgaatttttaaatcttattatccttaccctttaaatttttgtagtagcgtttggttgacattatttgggaaggattgaggtgagttatcagagaagttgttagactcacgataaatgtgaagaagttattaacaacgtatttgatgaacataaaaaatattgacaagttgataattacttaggcacttttcccatatttaaaaagtttgaagcacaaagaaatattatatctaacattgaaaaacagtaataaggcttgggaattgccgaaatatatatgtacgctctgtatcttaattatgtatgactcgagtgttccatctaatcacattagttatctattacacacgtaaagttacgctcaatgagtttcaaatgagttacaatagtttaaacttaaaataaatatttttaaaataattactttaaaaaaaagttattcaataagcatataagattttcttttcaaaataaacaaaaaaaaaatattttttttaaacagaaaagatttaaataaacatacgaaaaaaacaaaaaaaactacttattttattaaaaataagtatttttaacaaataaatttaaacaaattaactcaataagtttacaatacatgggtacatgcacagatgcaaaatgggagctacagtacataacatcatgaatagttgtcaacttattcgccgtccatcttgattgttgaaattttcttaattcattttccaaatggacatatgtgaagctctcagactgtttccagaggccaatcataaaaaaaaaattgatggcttccttcagtggcaattatgaagtaaacatatatccacgccaacacctcatgaatagttgtcaggtatctttagaccccgcgagaaatttggcaataaaaaatccaattgtatcaaggggagatgatggatcaaacctctgaacaaggtcttcctcccctggtcgtaaccactccctgcatagatatcatggtgtgaaaccaaaaattggcactgaatttttttatttattattttggataaaaagaaataaaaggtatgtccacaaacaataataaacagcatcacagatgagtgtgtatacaagatcatctatgtaagggagagataaaaatgcacaatcatggacaaatggatgaagggcttactctatatatccatcaggaaattcacagctaccaactagacccggtcctccaattcttgggtaatcaaatagtaaatccgaataactcaaccaagtgaactaataattcattacagaaaaactaaacatcaaaatttgtttgtagtcaccacttacccatcttatttataaattgtaagagggatcatccttcaattaattacatatataatcaagatagtaattcagcccgagaaatattgaagcctaatcaattcaaaagaataaaaataggaaattcggactgcaaagaattagcatcaaacctgtggtgccaatgacagatatttgtatttatccaaagcatatcgaactaatgcttcattctcaccaggattaatcgtacaactgttataagacaatagccatcaacaaatcagtgttaaagaaacgtctcaaataaaacggggtaaaataaaacttcagaagtgcccatccaaagataacataatggtttgaggcagcttaggtacaaaacaaacttcttgataattgaaaacaaaaaatctcttaaatctttcttgtattaagctgtttggctggaagcagattccgaagaagcaacttagacactaaataaaatatatttcagaccattacaaatacatttcaaaattactaatgtcatgtttagtttaggtaagaaagtgaaaggaaagaaaggcgaagggaagaaaaagaatggaaagtgagattatttttttggttgtttggtatgagagaaagtgaaaggaaagaaacatgatcacatgttgtaatagaaacttgtgagcatgcacagaaaaatgtgatcaacaaaaatgcatacttacgtggaatagacaattactcctccaggtcgaactaattgaacagcctggtcaaacatccttctctgatattttgcatgatttcttaaagattgaattgtttcctgccaaaaacaaatggcattgcatggttattcctctttttttttttttaagcaacttttttgtgggttaaatttttttatataaaaatgaacaataaaaactaacttaaccacccagagatgatgactatgcatcacattgaccaatatataattcatgctgacaatttcacaaattacactttctgggcaaaaaagggtgaacttaccatagaataatttttttccccaatcacattgaaataaccattgcttctacacattcctgtgtttcaggcaaaggttaagatatacacttatttgtgcaggatttagtagtaaaaactaatggtggtataaatcaagaaaagaaaaatgagaacacaatttcattttaagataagccagtagtccccgtatcctatctatatttgcaccaataaatctagattggtctaagcatgtgtgtgtaaattcaagtaaatgcaggataaatttcaatacacagatccacttctacctctccagcaaacaatcgaggccttaaaccaagggcagaacagggagcatcaagaagaactctgtcaaaactgtcaggagaaaaaccttttgaacgatcaaccctaccacccacacactgatttcttccaggtccattttgtgctcttcgcatgttcttccggatgtcagcttttctaacataagctcctccatgtgtttttttgcctttacctttaaaaattatttaaaaatgcatttgtaaattgttgatacagaaatgcttattgtgtatataacaaaatataaaacaggaaagtgacaaaccatagcacagaagaaatgagccaacagaaattcaataaatctaatcaagcataatatttgacatcattattcactttccagaccattttttaacactaaatgatactatgatgatgaggctcatgcaacagagacaaacaatgattcacagttctttcttttcagctgatgtttttctctttcatcttgaaaatataagaataagtttcttcgatctttgcatttagcaaacactactttcaacataaaacagaatgttagacaataaaagcgattcgattagtgtgattcaatgtataattccaatgcactagagttcagaatattcaccttattatgagatctatctgttgcaatgatctctccttcgtccttcataagtattgcaattgcagttgttttccctccaggtgcagcacacatatctagtatccgctcacccttttgtggatctgagtataaaaaaagaatctatataaagggaaaaaaaattacaaagagatgagaggataaggaatcctcaatccttcttaaaataagaacaatagtaaaacagcaatgaaaagggaaaaaccaacagagcaaagtaaacagagtgcagttcatatactccatccttcatatccacaccaactccttcagaaactcggaacatcccagcccttgacaacattgctgttccttgcccaatataaatcccatttcgttcaaaataataaggatctgtaaaacaagaaaaatacaaaatcctatcaaccatattccaaaactttacttcaacagaaacatttatcctcctcctaaacaaaccattttgattacaaacaaaacatcctttgcttgttttctacaaagaagaatctactcatgtcttactatttcaaactctattattagaaaatgttaccatgtctctttgaaaatacaatttcatctcccggatggctatccaattatccactgatggtttttcaggttaagcaattacgtatctgattggcaagtttaaaattaaagtctacctaaacatctacagcattcagacacaaacacacaattgttacctgtctcagatccttggagaacagtgccacgcgtcatagcaatcccccatcctccatcagcaccctgcttctccacagcaaccgaaaccgcaactgtatctcctttctcaacatgagcactgcaagccatcacaccaggaacatacatctaaaagcaaaactaacattaggagccaatcaaattcttcaccataatctgtaatctcccaaacacaacatagaatttggcaattggcaaagatattactattcactaacctgagcacctcgaagaactgcctcagcacacttcctactaacaatgacttccttcggaggctcatcgcggtacacgatggggtgcggtcccgaaccccaaacaaacaccacataatcaagtccaggaatctgacacttggaaattggatcagcagcagcagcagccgaacactccttcaacggattcgccacgtcatctccggaatcggattgcgccgatgccacgtcagcattcggcacgagcgaccgtaacttgtcgatgacggcgtcgccggtggacctgagcgtgttgactcggatgcaggagtagcgagaagggcgcctgcgaattcgaaagctcaatcaaaattaaaagttgcaaccaaaataataggctttgagggaaatgggaagagggtgcgtagtgcgtacgttagcgcggtggagatgcgagagaagtggtcggcgccgtaggctttgaggaaatactggtgaacttgagtgttccagtttagagtgggggtgtaggagtatctgtttgaaggatcggaatgcgacatcgtttgctggaactgagtgggggcaatctgtgtttggtgaagggttctgtaactactaaccaataattccctccctttcttcattcaaatgggggtggacatcaagcacccaagtaccgccacgaataggtgcgatggccagggcttcaaggtctttcttcatggataaatagttattttcatgtctatagaggaattataaattcgtctcaaaagataaaaatatggctaatgaaagagcatggcacattagagacaaatttgtcaatactttatatatttagaaacaaaaatagttatttatctaaaatataatttaatcttcatctcccctccttttttaatcgttgcaagtctaatagtacaataaacacttaaaaaaacaaaaataagttagaataaacataatctgtatgttgttctgaaatttctattgtgacagtatcttatcaaaaaatgagactcaaacaaaaatgcttagattaaacaagcatttttgtttgaatctcatttttgggtaaggtattgagatttcagagcaacagatatattatgcttattaattaatattattatgtttattctaacttatgattgcttttctattttttaagtgcttattataatgttatgcttggaacaattaaaaaaaagataaaaattaaattatattttggataaatagtcattttcgtctctcaatatgtaaagcgttgataaattcacctttaaatgtgttaagtagattctttcattaactgtaacggacgaaaattaacatatggatggatttgttacactttttttagtttcggtgactaaaatttaaattttcatctttcaggacgaatttcttagcactttacacatttatggacaaaaataactatttacctaatttaaaatataaatactatcaatgttattttgtttagttctttaaatacttttgtttcgattttagtccattttttaaattttgttgtgaattaacattaattgatctgacgttgacagtcattcaagaaaaaaagtacattaattattttatcaaattccttatttgatgacgtgataatttaataagttgtcatgttatcacttgataacaaaaattaaaacaaaaaaaatacaagaactaaaatcaaacaaaaaatatttaaatgattaaaaaaatatcatgttttgacgggactaaaagattatttaagctggagaaatagatttcgttcaagaaaacatactgataccaatatattaatggaactaggcttatattttaatcagatttcaagtctaagttttgtgaattaaaaaaatatagttgataaaaaagatccatgtataggtggtcaattaaattcttaataaagattagttatttttaaagttaataaatatatcatactaattaaatagtgacaaaaaataaagcataaaaatattaagtttacaatatgaataaaatatcaatctaacatattatacctccaactcaatgcttccaatttttttttgataattatcctgttcatgaagagaaagattttgactaattcaaaatttaaccaaaagataaataaaatttggttaataattatttttgtcaaaactaaatccgaataatatccaaatgattcaatcttaatttaggtatattaatcacttatatctaatctaatcatttccatggtagaattgacatgctttttaaaaaattggctataatcttgcaaaatttccaccttattctccgctgattgtgctgaccaaactatgtacagggacgagttcttaaccttgccatatttggattttttttttcttgaaatagtagtgactgctgcagctttgagtgccacttacattctaataactgaagttgatgttcaagatgtcaattctctgggtcatgtgctgtatacgagaacgatagagttaactgaaactatagtctctagttgggcaattcaatttaatgatggaaagaaatggaaattaaacaagtattgatcgtatttataggataaaaatgaaataaatttagtttgttgactaattttaactgccgtaactttaggacataaagagttgattgaatagatagaggtaaatttaagttgtgataaattacaattttttatacaataaaaaaaaaaaatcttcgaactagttcagaagggtgataaatattaattgcgttatcatgtgttcttctgttccagataagctgatgtaatattttgataaattttccatttatgaataaaactagaaaacgacttcaaaacaacggttaatagcggactcattcaaatacgtgataagaataagatagagtagaagaaagacagacattgctcgtgttgtctacacatagatagatagaatggcaattttcatagtccaagcaaatacaatatgctttgacaaatgagatcaggtgatattcattattcatgttgtgggtgtttgattctactattagacttcttaatgcacaaaaaatgaaatgggtgaataggattcggcataaacaaaaaatgaaatgggtgaataggtttcggcgtaaagtctacattttaactgttaagttttcttagaatatttttaaaagaaaataaaaagaaaaaaatgaaatgaatttttttatgaattaaaatgagtttttcattagcttatttgtagatgtcatctcatcttttagagaagttatattgatgtatttttaaaaattagctaatgaaaaatttatttttatttatgaaaaagttcatctcattttctttataaatgtttctaaataaacttatccaaacatatctataataatagtcaccaattagattaatgtctaggtatgatggtagtatttttttatagaaaagattttattaagaaaataatatatagtatagcctgtaccattaatacaacactacaattagtacaagaaatctacaacaataataaatcaacataaagtagaaagtaattgggttgggtgtggacgtcgaataagacgtggttttggctaaaggttccacaaaccactattgtcagtgcaagtcacaagtgaaaaactagagaagacaataatcgtacagttagatttcttttatttaattcttcacggaaagtgtcactacccactagcgaaatgatttcgtgtatatttttctttcattttaagctttgtgacactcaaacccacacgagtcatgttatagtgcacatctatctgatcgatatatgaaaaaacttggaagttatacagcataaacattttttttttctgtattcggagtgaggaagtatcacgtggaagaaagattacaacatggtacagtaaaatccaagaattaataaatggaagagtctatcacttttcaaagtactagtaacctcttcctaccccggcgcggataaggaaaaaagacactaatttgatgttgattcttggcacgtatgtttgcatcgaatttcaacaactatgctaatttttctatgatctcaatgttccttcacacttatttgcctagtgattgagatttctgggtattcacaatcagttccaggaacccattttgcacgttacgacaccataatcacgtattcacatgctccaaccagaaaactgcctcggtgtgcagccacacccatagcaatatattccatttactctcttttcttttacatcacattaattattgcatccataattttctcttttcagatcatttcactaagataatgatatgttagtagatacaacttgtataaaataaaattttgaataatatttttttcaagttgtgataataaagattttaataatttaatgttacacgatttgataacgatataaaaagttaatagtatgttgaaattaaattatttttttacctatctttcaaatgatctttttaagagaaacttattgttactagaaaatgttttatttaaataacttttaatcccttaaaaattgtaatttctattatatatctcttaaattttttcctacatatacctgtataaaatatattttttgtctacaataaattttccatttattgttttctcttgaaccttttaaatatcaagattttttaaattttattattttaaataattaaataaaataatgatatttaaaaagcaataaatgatatacttgtaatatttaaaagaatcaaacaaaaacaaaaacaaaaaactatatacctaatagaaaaaaaccaacaaaaaataataataaaggaatcgtttactaaaaatacgtttttattaagaaatagttttaaaaaattaccatgaggaactaagcaagaaaattacacatttttggggccctccctttggcctctacttggcacattattagctacactttttaaaatacaaattcaaacccgataaaaaggggtcgataatgatctcattctcctgaatcactattatttactttgtcaacaaattctttagcattagttttcattatttaagtcacaaaggtggatttgtctttctccatgttccgttcaatagatgacgactggttcaaaattctgacagctccaattttgtttttttggatcatgatttatcaaacaccatgtctttgacttttgctagttgcagccttgcgaggcaaaagtaatatctgtgacacaatcacaagccaaggaagcaggaagcagagaggaaaatcctgtgataacaataccagaccaaacatcatttattatttagacttaaatatgatttatctctaagataattattttgaatttctgataattttttgtattaaatttaagatagtaattatatatcaaaatttttattttaaatcactgcgtgacacaatctcaacagataatagatcaaaaagatttgtcatacaaaatgtaatgtctcatatatattgaattttaaaaattgtttctaaaattagtataaaaagacgcaaagcaacaattttaggtgttaagattgatgcacaccatatacatcttaggtaaaataagtgtgtctttgaatagaagattgcaaacctagatttgtagaagtatcatcactcttatttttacttttaacttacttttatccattaaatttacatagagtgcacacatcatattttcaacttaaataaaaacacactaaaaaactcggaatgtaatcctaagtctcttcttttgaagtactgtatgtaatcctaactcggaggtgtaaatagtttgaaataatgctatccgtgatgagaaattcacttcaaataagtactatatgttttctttatttttaaaaatggttttccaaaatgaaaattctacacaatctcttttattagaaactttataattcattttaagggctgataaaatatgataaataataattagtgctttaataacattggttaaagaatttaaaatcaaaataggggcaaataccaatataatttcatatatctctttaaaatattccaatttggaaaaaaaatggatagacaaaaaattatatcatccataaattttcttataattttttatgatttatataataaatatttttaattttaatttcttaatcaacgagagaaactcagaatgctgatcaccaaaacccataaaatactaaggctttattgtgaataaaaccgcgttgttgggatcaacctttgacattaggcttccaagtctttctcattcgttgttactaataaagtcacaccaccttgcttttcaatccttctttcttccttctctccgtcaaaaacaattcccatctgccaaaaccaatgttttggcctcaaaactcataagttcacattttttttttcttcatttccatttactttgccaatccctcatcttcattcattttcctcttgttttaagattttgcttctgattgattacctttgagataaacttgtgaactcagttctttctttgaccctcttggctaagctcagaaatttccataaagaaatagattttctccctgaaattctgttaggtgcttgatcttggattttcattgggtccaagaaagaagatatcatcgttactatggttttgaaggtttctctcattgtggttctgcttgtgatatgctcctgtgttgtggaagccatttctaggaatcacaatcacaacaatatcaacaaaaatggatcttctctggctgccataaagtttcctgatcatccaagtttcaatgatgtctcttcttctggggacaatgattgtagcttctcaaattctgagcaacttgggcattctgtacctaccaggacatcaggtgaagaaactgatgaagagagtgaggcttttccagcaccaaaaccacacaagaattcggtgaaactccacttgaaacacagatcagggagcaaaggtgctgagcctaaaaagtctgtgattgattccacagtaagagatttcaccagaattcagaaccttcacagaagggtcatagaaaagaacaaccaaaacaccatttcaaggctgcagaggttacagaaggagcaaccaaagcagtccttcaagccagtggttgctccggttgcttcaccgactagtccagtttccgggcagcttgtggcaaccttggaatcaggggtgagtcttggctctggtgagtacttcatggatgtgtttgtggggacaccccctaagcatttttctctgatacttgacactggtagtgaccttaattggattcaatgtgttccttgcattgcatgttttgagcaaagtgggccatattatgaccccaaagattctagttcttttaggaatataagctgtcatgatccccggtgccaattggtttcatccccggatccacctaatccttgcaaggctgagaatcagagttgtccctacttttattggtatggggatggttccaatacaactggggattttgcattggagactttcactgttaatctcaccactcctaatgggaagtcagagttgaagcatgtggagaatgtgatgtttggatgtggtcattggaatagaggcctgtttcatggtgcttctggtttgctaggattggggaaaggatcattgtcatttgcttctcaaatgcaatctctctatggtcaatctttttcctattgtcttgtggataggaatagcaatgcaagtgttagcagcaagttgatttttggtgaggacaaggagctcctcagccaccccaatttgaatttcacttcttttggtggtgggaaagatggttcagttgacacattttactatgtccagataaattctgttatggttgatgatgaggtgctgaagatacctgaggagacttggcatttgtcttcagaaggtgctggtggtaccataattgattctggcaccactttaacatattttgctgagcctgcttatgagattatcaaggaggcttttgtgaggaaaattaacggctatgaacttgttgaaggccttcctcctctaaagccatgctacaatgtgtctggaattgaaaagatggagctacctgactttggaatcttgtttgctgatggagcagtgtggaattttccagtggagaattattttatccatattgatcctgatgttgtttgtttggctattttggggaatcctcgatctgccctttcaataattggaaactatcagcagcagaatttccacatactatatgatatgaagaaatccagacttggctatgcaccaatgaagtgtgctgatgtttaacattttttggggttgaaacttgaaaggtgtatactgtatagtctcataattgtaaacatggtgagtcagggggtagattttttggttttcccttaggtagaaattggaaagtgatatacaccaaaaataaataaataattcaaagttgattatagaactaggttccaggtaattacagaaaactggatcattacaaacataaacatttgttttgtacacattttgactgctcaattttgagcttgtctcatttaattttaatatttgttctttctatatatgaatatatgatgttctctcttactatcattctggacatgttattgttttgtatattcattattctcaaaggaaaattgctccgtatatgtgtgtgtgtatatatatatatatatatatatgcacacacacaagaaataaagaaacttggcaatgaagttctgtatcctgagtctccaagtcaagggggcaataacagttcgtggtttgctcattgttactatcctactttcttgtagactacatcctttaaaatttatacttatttcctcttttaaaatacttttaaatgaaaaataaatcaaatggcacatggacatggtcgtttcccatatgtcgcatcagtgtattattccatggcttttctgttaggatacactgccaactttataagaaaaatggaccaaagaataggtcaactctattgttggcctaggtactttgacattaatctaaagaataatactacctacacgtcaattttatatgataaattttacagtttacaagaaaaggggggaaaaaagggaaaagtattagggatcacaatccttctgcccaaggatgtatctctgtaaccaaagaattaaataagacaagttatgtgataaaaaaaaacaaattataagaagtgttataagcatttattgtaagtgtattattactacaatctagctctctcatttctttctttgtttttttcttttgctaagagttatacttttttacccttaaaatagagtctttttatatccttattttgttcttttgttttatattgtgagagacgtttttccttattatgccgttatagtaaatggtaatgtttataggaatttccgaagaggaaatagctccatcaatgtagattttataagtttctcattaaaaaaatataagttttatgtgtaagcttctgtttaataagatgagtacaaatacaattatttgactgtcgtcctttgctgaattggtctgtatacttaaacgtaaaatttgcagtttgcctacttccataaatgttctggtacattttattctttttcatagttctgcatcggcaaccagtatgaactatgaagcctatatttaagttttgagtgaataatcatcgtagactattatcatatatttattttcctccaaattccaagcaacaggagtacaggactattttgtaaaaaaaaaaagtagtacaggactatagttattagtttattctttttttggtcatattcaaacctaaggttaagatatgaattaagtgggtattattttcaactcgagagccgtgttttaccctgagcatattttgttagagtgtgacatcaattaggtgaaagaattttcaatgaaaattttaataaatttatgcaccttgttaatatagatttgcttacagagagtggtcataatataactgtgtctatgaccaatggtgacaaaaaaaagtgagcgaatatattaagggtatgttagagtgagctatttgcgaatttttttttttttagtgaagttgattttaaataaaattaattttacaaaattaatttgaaatgaaatgaaatttaaaatgatttgatttgttttttagtgttttaagtttaaaaataagttagtggtaaaacttaggttaaatttcttagttgattcttaaagacttcaactatttgggatttttaagtaggtctttatttttaaactttggtcttaatcatgtaattttttttaactggattcttaatgatgaaattaatttttttatttataaaaaagtcaaccttgagagcctacttttttagttcaaagactttttttttttttttttttatagttgcacgtgaattgtgatacacttacaagttacaaccactcatacaactctctctatgacattattcattatattttacaattcttcttcttttgtactatttgttgaatgagttgttatacaaatattatttctcaatcaacaatagtggatggtgaaggttggtgagtccacaatatagaggacggatttaaagtgtatagtttgcatatgctcccgtgtgggtattgtggaccacggatttaaagtgtgttatttgcatattttaaataagtaattatatatgaacccttgtatatcaaataatttattaatatttttttcttttatattatatcatttgacatgtaaaagaaatatcatatatacactcttttttctcactaggaggtgtcatataaatgttagatgtttatgaattattgtcatacttaaataggtctgcccaagaaattcaaaagaggcccaagtaatctatttttagacttgatatttttaaaaacctaacttgcaatttattattttatttaaaagcttattttattttaaaaaaattataaactgtaaaaattaaaatcacgactactcaatacacaagacaaatgtgaaaataaataggttagactttataagataaaatatgaatctgacttgtctacatgataaggttgtttttaaggtataatatgacctccataataacttatttaataacacatgaagcacatttcattaaaaaaaaaaaaaaaagatgaagcacatgtttggtttggatgcgtttttaaagagatgattttttctataaatcctttatagaaaatttgtaaaagatacggttttatttttaaaataagctgaacttaaaatgacttctaagttctaattgtcatagtacataaattaaacagtcaatctcaataatatttgtaaatttaccttgtgtaaaaaatattggattgattttagattgtaattttttttcattgatttctaaggaaaatgatacatatgcccctggagaattagaaaaataataatttgaattggctttatgaaaggaaaaaaagtttactgttgagagtgttagtcaaatgtaaaaaatggtcaatctgagcctggggtttcagttgggcccaactaaaggaaggcaccggcccattagggttttagtttgcatatatgatcctttgttgattagctcgtagcagtggaacaacagttgacggaagcaatcgaaatcggcggagatggttgccatgagggtgggtaatgttaatgttaatgttaatggtttttgtgttttatttagtttgcagtgtgagttggtgtaatttaacatgtgaatgtgattatggttgaagcagtttcaccagtatcaggtggtgggaagggctcttcctacccattccgatgagcatcctaagatctaccgcatgaaactctgggccaccaacgaggtccgtgccaaatccaagttctggtatgtttattgttcatctctagttcaaatgttatttattcgtattcgtactaattcaataataaaatgcagtcttttctatttctgatttattgttattattattgacaatgttaatgttaattgtttcaggtattttttgagaaaattgaagaaggttaagaaaagcaatggacaagtgctagccatcaatgaggtgtgcacttctcaattttactagtatgtttctgttcgtctcagaaatatcaattattgcactacaatgaattacttttgagcgctagttacttgttaaaatgattttaatgaggctagatttctacgttgaagaattctagaggattttttttttatatataaatattatacggctgggcttaacttgtgcattaaatttgtttaagttatgtagacatttgaagaacggtagacataatgccacatgtagagaccctgttaggtgtggatttgactacgggaagtcatttatgcttaactatctgttgggtagatcacattatttctctttttctgtttttatttttattgactatggaagcaaatagttttcttgtcaatttttgccaccggtatgatgcaatctagtggcgtaggtgtaggactgtagataaatggagtgtactcgagtcatatggtgcattatttctgactaacaacctaacattagcacacaggaaatggtaaatgaggtgaaaggttttgaagtttggacatttggtgaattatgatcttatgaaagcccttttaggaaagaaatacttgaacaaatatttgtattctaggttcattgctgtcttattggacaatggacatggaggtttgagtgtttgtactgattgcagatttttgagaagaatcctaccaagattaagaattatggaatttggctgcgttatcagagccgcactggttatcacaatatgtacaaggaataccgggatactactctgaatggtgcggttgagcatatgtacactgaaatggcatctcgtcatagggtgaggcatccatgcatccagataattaagactgccaccatcccagctaagctgtgcaaaagggagagcaccaagcagttccacaattctaaaatcaaattcccattggtgttcaagaagattaggcctccaactaggaagctgaagacaacatacaaggcatccaggccaaacctgtttatgtgattcagttcatggaatttccctgcttgttgattcattaagtataaataggaagagcttagaggtgatccatgtagtgacaaacttcgttgcctgcaacatagtttgcattctttcaagctctgaagattttgtttttggaagatggtgttttatttaattttatatttttgcagagtaatctattttactcattctgatgtattcgataaaggttgcttttgaatttagcgattacttttggtttatcacttgttagttgatatgttctctctgatttttggtaataaatattttagaccaagcatggcttataaaggacaaagctttaagtgtacaaccttgagtgttttttgtgtttttaaaatcatattgaactttgatctcaaatttctacattgatttttaatgcagactatttatgttactgaagtgaaactgcagaaaacatgaaacaccttagcaactgcacctaagttttgtttgtcaataaacttgatttctttggaagaaagataaacaaggcatgtgttaattcagtcattgccgcttcggttttcattttaaacttcacagtagggcctcacttcattactatttattatctagcttattaaggtagaagtaagaacatgaaatttaatgttaaattttaagtaaaataattaaaataaatgattaatattggattttaataaactattttgttaagttgtatgacaaggatttaagttatcttaaaagtaatcaatattgtaggctggataactattataaatttgttttaagattcttttacgtacatttacgcactcttcatctgtatcttatgattagtgtgtaacttcttttaaacaattaaacgggtatactttgtgcttgtgcatactcctgattgatgacgaactacatcatggtcttagtcaaaattaaatcgtttcaatttgctcactggtgtaattaaaaaaagcttttgtattattagtttattaacttttgatttttattaaatgacaaaaaaaactcacttggtaacttgaactaaacatgttattacttgctgcgcaggattatcctgtcgctcgtaagcgaatttacatttactaaggaacacaaattgaagaatgctataaaagtaattaactaagttagtaataaaaaaaaagtaaaaataaactaatataagcaacggtgaagggttaacatgagggaccacgtgcatctacaccttttacggttcagcattaacacttgttcattattctattcccagtgtgcaagtgcagatataattttaactcacaatgacaaataggttatatgagttgtgactgtcttatttacagtgttttccatatcccataatcatatttgtgacctaccattgtcatgcagatgcaagcatgagataaaaatataggaaaaagaatactgaaaaacttctaattgcaggtctggtaataattagagggacaacgttgaagttttggctcaaaattttaaattatgtgaaatgttaagcgtaatcacaaagaaagggctgatgtataatttccttgagatggattggtcgtttaaaatatggaaaaatattaacctcgaagctgcatgaaagaaatgtgatttgatacgaacaagaatgccatgtctaaaatttaagaaaggaaataacctttggtagagtttgaatttattcacttacatttaatgttttgttcaagcatcttataataatgtgtgttgagcagtgggaaacagaagatagtgtttacctgggaagtctaccacgacccactttgtcttttagaaccctccatcgaaatctgacatacttttttcttttttctgaaactccacattctccaccataaacacaaaaagcttgtggaagttaaccccacaaccacaagtttgaaatctcatttcattatatatcccaacaccccactttcataaccatcatttttcatgcaacaaccagtgctatttagtctattattgtaactttaaacagaaatatataattttgaaggttaaaactctatctattttcggcttattgatgagttctctctttgcttcaagttggtctcattctctcctgatttggtctcaactttttagttgtgcaatctgagaagaaaggtaagagtgctatgaatcctcaaacacacatacacatatagagtcatgtagttaccttagccagcttgagaagaaacacatacaaattcaagaatgtcagtgtttctgccttgaagtcttattcactggcagtggagattgagttggccatcatcatattttcaacaaaagaagaatgagagttcagcaaaaactcagtgctttcctctttcaattaagtattgtttttatcatgtttctccttgttagcgcatctcaagagcacaagaaagctaaaggcagacattcaagcaaaaaagaccataacatcaaggtatttcattcctgcattgtattctttctaattttgatcaattaagttggtattataattttgtatattcttgtccttgtctacattgctattataatcctctattaagttttgtttgtgaagttacctttttattgtggttgttttatgcatgaagatgagttctagacttcagttcgaaatcacactagctacatgggtttctcttgtgggcttcaatggcgttcttaatgcctattgctatactagtcatcagactgtccaacagagaggggaatcaaagaaggattattattatattttatgttcatgcagttttgcaggaaaatctatctaaacctaaaaccgatcagttacattataattataaatttaaatcatagctcacaatttttttttttggtatatttaatttgtttcttttccctttacttggcaacccatatttgtacaattatttatatcgtttcagtttagtttagaagggtcagttgtcccactaattaacttctaatgatggtggaatggagataagaataacaagattcccatttcacagttaatttgtttgtcctaaagcttattagtcactacataaggtcaagtgaggggtattgcatctttgtctattggaaaggactataatgaatggtttgaagacaaaaaagaatctttaaaaaataatcttcttggttattggaagttccaagctttctttgtctcattttttaatagagcatgtgaaaagaactatgcaattatgctgttgtctgtatcattaatcaagttttagctcaacttataaaaaggccagaagtgaatgtacctctactattaacaaaagtaactaggtttattttaaagctttcttttcttgcattgatccttgccttttttattaattatatgcacgttttgtatttctgttcaacagaagcttgccgtacttcttgccactgcaggaacaatcatatccataaaaaatttcaacaactccttcagcaataatcatcaaagattaggggtagcattatatggtattatctggctgcaagttctaaatggtatttttcgaccacaaaggtgaaccaatgaattgcttgttattaagaaaatctatgcaatatattggattaggccatttagcatttgctaaataccaaacttagacaacgcagtcaaacttttcttctcttttaaatttattaagatttttcatgttctatgttcatattttctagagagccagctttattaacagctacagatttctgtttgcgaagcatgatgattagggtacaactgttttcttgttcttcgcaggggatccaaaaaaagaagtcttaggttctatgcacactggatagtgggaactgcagtgtcattactgggtgtgctgaatgtatttataggtttacaagcctaccaagaaaaaatatccaaaagcataacaacttggaatatacttttcaccgttcagatatctttaattgtgatattctaccttcttcaagaaaaatgggtctgcatacataaccaaggagtgatttgggacaactaactactgattcctacttgattagaaaaaaaagctagttcaaatgacaagaatgcaggcatgaaggctgagtcttgctaagaaagatgaatcaatgccttgccatggatgcaagtatttgaaacacataagaccacagatggacctcaattgctttccctaagataaaatatgtttgtgtgggtgtcttttttcagagaaggtacagtcattgaaaactttgtaatgtcttcccgcaagaaacatttttttttgttgtattctcctaacaatcaattctgatatttttttcaaaccttgatgtggacgctggaatacttcatggagatagatcaatatattatccatgatgtttttttcaatgtttgaggacattgtttgtcagtgtttataagcatttcaaaataaaaagaatttgctaaccaaaggggaaaagacagacaccctatcactaaaacaggagaaaacaaataaggtaagaaattctattagtatcacattgatatatcacttaagaagtatcgctaactatagtatttcaaggaaaaagctgtacatagccggttaatagagctattcctagtattataaaaggtggaagaatcacaaatgctcctatggttccaaagaaaactgaatcattcctttgagacacttcattgaggtaagcttgtctcctgatatttctcttttgtgagatggtgaagaacttcgcactcactttcttcaagtttttacctaggggtatggtgaaatcatcattcctttctccaaataactgcacgagctgctctcggattgtaagtttgcttccatcactttcataacctataaaccagaaaggttcaatctttgtaatccttttcccaatattgaaaaaaaaaaaaaaaaatacaagaggttataaacagacatggctataaaatttctattctttcacataactcatgagacaaacatccatatcaggagtgattcataacatagagataaaaggcatgggagaatttcaaaagttatgcaagatggggagaaatagacatatgatcataccaaaaatatggactttactcttctaaagtgagaaattaagggtgcatttacaattgatttgaatccaaataacttgtaaacttgagccacttcaaactaaggataaatacatccttactttctcactttacattttttcttatcttagcggagtcaaatatttactcaattttcaaactttcatgctagctatttacctcccatacagctactactgctaaacacattatctttgatgaacaaatcatattacaacacccaaattctaccatgaatttggtctatgctgagtagtactatgtgataccaacgttattgtttctactctaaatgtttatactatgcggccataagggggaaagataaggtaacatcaaaggcaagctctttcatagtatcattgaaattttaatgatatggcagcagcatataatcttgtaacttgtgatttcaaaggcactactcttgctttcaatttttttcccattaaaagtattaaaacaattacattctccagccatgtctatatcttcagcatatttcatttaaactaacaagttaacaacaaaacagagaaggggtttctcacagtgataaaatggccttacaaaaacagaagacaactaatctgtctcccctacacatatcattgatttaaagaggagatgttagcttacgtaccactattaggtgagcttgtagatgtaagttgttccaaaagatccagctgtgcacgagaagaagataaagatcctaacaacacaaagtccccagaagccaagttcagacatgaacgagaacctcatattgtaaaatttagaagtatttggtagaaatttaaactggtaagataaaaaaaattaagaaaatttgagacagtgaagaaatcaaacacatgactttcctacaaatatttcaagtttaatagaagttctgattcatttttccacttgtaaccatgtggatgcaacaaatattaaaatataactaacataatttctcacttttctaaatatttgtggtcgggatcatcaaagaaagaatatattttttaatatataaatcaacaaccaatattttttgtattgggtcggagacatgcatatctttcaacccacatgatttagagactaatcatactcacgacacgtaattactaaatcattgatccaaaaaaaatttacacacagaattaataaaatataaattcttccgttaaatgaattattttaacatacacatatggttaatcaacaaatatggaaattcatggttatccccataagcccatatttgattcaataatagtaataataataaagagtgggtaggaattgttagcgtatataccattaccagcagaagcatcttcctgtgtaactccagtgtcagtcccttgtgtttgagcacatgttgtgagtaaagaggaagaaggatggtagaatttgatgaggttgttgtgtttatgggtcagaaaagaaggcttggagtggagagaagcagtgctgctgagattgatggccataaagtgaggttttttggagttagttgctaatgccattcattttggtttcagctttgcagttccaggtaggtattttacttggccaagggcggcacttccctgccacaaataatatctgtggaggattctagttctatgtaggaccacaaaaaaatcattcttctaaatccccaccgttcaaaaatatttttctttcactaaataaagacacaaacaatgtcaagttactacagtcttttgtcttatgggtttattattatttagtcacttatgtttactttatatttaacatagtcattttatgtaaatttataattttttactatcttatactaatttattgcttaatatgttgtacactgttaaaatatatagattattacttttttttctgaatatatagattattactaattgatgtacaatttaatcataactgcattagtaaactttgaattaacacattcaccaatttaataactaattttaaaaacattgctaatatggatttaagttttgaattaatacattcatcattttttattaagtcaaatgtaattttttattattggatcgttcttataaaatttaatggaaaagttttttgaacttatttttaaaaaaaaaaaaaaataagtgttcatttaaataaaataaacatttttatgatttttttttactaatatcttgatatatagagagatagaggtagattgaaatttatctgaaaaaagatagttaaaaagacttaactgagtgttatatagattaacgaacattgtgttttagtatgaaataaaaaaaaattataagtttgttgaaaaatagactcattattatttctatattttagaaaaattatttttagtcattttcctttttcatctctctcctatttcttttttctttttttttaatttttttatatttatcattggattcatatgtcatcaactctaattaacttagattaaaaatattttgatatgtatgttaattcattcatgagattctaaacaaaaattaaataaaaattattcattaataagtattgataccaagtatgaaataaaggcacatctctgaagtctgcaacagccccagcgcagtggtactctaagttgtatatcaccttttgtggggtgtttattggatcggatttatctcatgaatcccaccatcaaagtcaaattaaatcaattaatttgaattttgaatttattatttttcaattcgaactaacttcaaccaattcaaaaaaaaaaaaattaaattaatatattttgagatagcgtccttttaacaggcccgtgtcaactgtcaatcactcaaaacaccaccgatgatcagagagctgccttcaaatccttacctgcggtgagagacaacaaattaacacattaccataagctttccaatactaattcaagttactccttatcaattttgatctacacctttggacgctgtcaagtctatttttaactactttcatttttaactgtttctctgtgtcatctattttttgcctttacttgtatttcgaaattagtgtgtgtatgagatgatatagtcatatatccccgtttatttaaatttaaatttatttgttaatttttttaatataataactagttttctgtttctttatgtttgtctaattcacctttatttttataaaaaaagaaaattttgtttttttaataagtaaatcttatttatttcttcaaaaatcataggacagctatacattggcaatgattataaaagtgccattatcagacaaattaaaaatgaatataatacatcttaaaaaaacgaatttaatacaaattaatgagatcatattgcaaaccttaagtttggcagattagcgattccaaaatgggcggcaatggaacctttacggtatgtctttttttccaaaattcatgcagttgacaattttaaattgtaaattttcaacagagtaaatcaatagtgacaaataaaagactgtttcaaactcaaaatgacaatgaagaatgagtttgaagattctgaattatgaaggaaaacaaataaatcctagaaggatttggatggaagctctcaacgtgatttcccttcaatgttaatcgggcctccttcgcaatttcttttaattttattttaagcttcattttaacatttaacttcttttataaatttaaattctccaacttatttcgtgttaggtttatttttgccgttactttttattatgcacaggtgaatattgaactccctcaggtccacagactgaggtactcgaatttttatgattattggcaattttacggataaaaaatcttaacaaccatttcatttgccgtcattatttgacagcatagcagttatattacccatcataccttgataggatcttctagtttacataaaagataaatacttcaattttaacaaaaaagagagattacaagtcataacgtgaaataattacataaaatattgcgaagctgcaacaaacttgtgaaaaaaataaattaatgaattagataaagatagtttacactatacatgaagatattggcagacatacgtaaggcatgatgaaataatcgtttacatgtctattaatcatggggagtatactacaacacttgtttctacattccatcaaaaggctttatttctctacattgaaaagtaacaacaaataatcaagaaattcgagattaaccaataacagtaatttcatttaaaaaggaaaaaaaaaaaaaaaaagggaaggaaggaagaagatgaatagaaatgaaaaaaagaaaaaaatatattaaatcatttaaatgtttgtacctcatgcttgctagcagaagtagcaggcctcttcctcatgtttccaagcaaactcttttcaataactttcaagaagcaatatgagaagtagcagatgtggtttaatttgctagactacaaattatttactggatcatgactttgaggaagtctgatctttttcaatcaaagaagaacccaattgaagcataagaggataaacagggctaaactccttatctcctctgctcctcacatttgcagcataatcatcaagtgttgctttgatgcccttccagatttgatcctcccattgagaatctagccacagtgaatactgcaatggtgttagtttgttcctttgcagcggtgactgcaattcttcaggagcacgggtatacagatgatgaagtatgacatttggtggcagatcttgaagaagtggtgatgatgcaagctgggacgtttccaagaaaataagcggacgaaatgctctaagtgcacgatatggtgcacccagttgctcaacagggaacaaattttggcccacagctagctccaattcagccatatctctagccatcctcaacttgcctgattctgaaagtggcctcacaagagatgcgtgtcggatgaagaatactagaacacgtgaagccatgctctggacaagcctggtgcatatgttctctgtaccaggagctgttgaattcctggaaggcaacaacctagaaagaaactcactgcgaaagtgaagaatacacttctggagttcctccatgtaaggtgatgcattgttgtccatagcagcatccattccgagcactccaaagttatgatcatgtatttgtaatatgcaagactcaagacgatccagcattgcctggaacaaagctgttacagaatcacaggcaacaccatatatggcacctaatgaagcagacaacacatctgcagcaatactgggcattcctttaagtatagatgatatctgtgtatgaacatcttgcagatgctgacataatgtaaagttcttgagctgtgctggtgttgcgggaccatttacttgacgtgattcaggaccagtggatatctgtcataacaatgacattgaacaattaaaagattagaaactatgcttctatagtagtcatcctcccttcacttgaataaaatggactttgggattctatatattgcaaaactcatacacgaagaaggggaaacaaagcctttaggttccagataaaacatacagcaacagcacttcaggtagtaattatctatctccagtcattatgtctcaccataccatgacaagtgacaacacttcaggtagtaacatcggaaaaatattatataagtctagcaaaaatattaattactcaacacactgaaaaataaaatgagcaagcaagttaaatgattgaccgttgctgatcactacaatgtgatacagtgcaagtccaataatacaatacacatatgaagtataaactcctcaatgaaagaacacgatattctttatgcatgcagttaacaatgccatgatttactgtgcagtcaacaaaactttccttcttctgtgaatccattctttccttgtaataaaatattctttattccaaaaatattagtagttatataacagctaactttatagcctgccatcctgaaaacccatgatctagatagcattgaattcatttctaagccaataaatgtagcgcttaaaacatctaataagcaacaatgccttagatacaataacgtcatttctgtttacctggtattcagctcgttctgcaagaagaattaaaaccttgccaatttcacgcaaaacaagaagagttaagcgtgcatccatctgaacagtttctatctcttcctgaatgcgtgatataattcttgatatttgttccttggagggaacactaccacgactggacattggaaatacagaattcactagatctgaaaggcgactcaagcaatgagccaaaaatgcattctggaatatttcgacagctgaaattatcttctcttttccagacgaattgatagctggtaacactcctttgacatctgtgtcatgtgaaattctttcaagtagattctctatcatggagtaaagctttggatatcccattgtaaaaatctctttaacaaaacttgatgcagtgaaagcagacttcatttggcttgcaaaagcctttgtaatggcctcccacactcgatctgttagcataggatcaccttcctatgccgcagcaggcaacatccaaaaatgagataaaaaaatccaatagaaaataagaaagtgcgaacaacagtagttagaatatgtatgatctgatgagtgttccttggtaagaactcaatactgtaaagtataatagatcatgaagacccaaatccctaggaaataggaagtccattgaatctgtttatttgcacatggttaagatcacaattttttccaaaatctaggataaaagaccttactaaaaaaatcaatgcaacttcttcatacatctaacatattgatcactttattacactctgaatacatacagaggagatgattttcaaaagattgcatattgatctcattgcatccaaaatccatctagcggtgtttaatgcatcagaagagaatggacaggcatgaacttttacaatttctctactctgcatcctatactactcttttgaagagagaaaggtctttgacagtataatgttgcataaagctggaagcctattaaaataattctacacaaaagagaaacaacaagcaattacccttgatctccttactccctcttcacttatgcataggtaatatagcatagcacaagtcaccccttggcatctgtttacagcataccagaggaaaagaagaccacaaaaaggaaagatttggaaggctggcaaatggtttgtattgcacagcaaatacttgattgatactaaaaaattgaaatattacagtcttgccttgtggtctctaacatttgtagatctattaaaccagtgcaatagattcatagatcttgtcatgtcagtctcttcaaaaccaaatgaaaacacacgtaccgaaactagcaattaatgactcaattcaagcttctaatataatcctcagattcttccatttgggaagagtgacacacaaaataatagctctcaatacactaataaaatcgcgtgtgaaaaactaaaaataacctgtttgtgctaacaatttccaaactaatattcaaacaccaaagtttggctggccattttgcataataagctaaagctaagccacagggtattcgttacacaattatgtcggtaaagtaaaccaattcctattttgtcgttacacaatactatctatcatctacatatcaaactatggcgttcaaaggacaaacaataatttctattgtcgtgtgatggatgcagaagagcatatatgaatccaaggaagcaacaacataatttccttctgatgtaaacaaacaactaaaacaaaaacaatgagcctcacctgaatgacctcatcaagcaacaaaacatgtgtaaagggatcacgttttttagagagcaccctctgcaaatgccacacagcaacagcaatggaatgcaactgatccatgcaatttcccaacctatgccagagagcctctctagctttagcccctcctccaatgtggggcgttccagagcccctaatcccaccaggaccgtacccacttccacccgaaatggtcttcatgtccaacgccacagtgacactcttagcacccaaacccttatacttattcaccacctgctccacagtgcccttcaattccccaagattgtagaaaacctgcaacccggtcccaacctctgcctggttcaacccttccattccgcgttccagaaccttcatcgcctcgctgcgaagcagatctcccgtttccctgacccaactgagctcttcgtcgacggcgtcgatgccggcgaggtcgtactcgtcgcagaggctgaggatctcgaagtggagctgggcggccttggcgagatcgagtttttcggggtcggcggcggccatgaggtcacggagcttcttggaaaggcggagggcgcggatggagtgctggaggagctcggtggtgcggtggaggttggagagctgggcggttttggcggcgacggagcggtgagggtcggagagctcggagcggaggcgacggacggaggactggatcgacgagagcgcggatctgagggtggagagggcgtggtccgcgtggtggagggacgagagctgcgagaggaggtcgtggtgccgcgagaggacttccgagcggagctggttctccaggaggcggattgcgtggtggagcttctccgcggtggaggccggggagccggaggagagcgcggcggaggagaaggaggtggaggagaaggaaggggagaggaaggcggagaagatgggatccgaggccagagagtctagggcggaggaggagggggtggcggcggtggcggcggtggcggcggaggaggggtttttgaaggtggagaggcgttgcatcggagatgcgccggtagagaccggcgtcctcgccgacgctggtgacgccattgtgattttcgttttggcgagcgagcgacgaaggtcgtttagtctagtagacactaggataggatagttactctattacttttgttttatgtaacttcttgcttctgtaattgttttgtgtgattgtgtctcattatttttttttaatttacttaccattcatgtgattttgattttgttaatgatttttttttaaaatttagtatcctcactttttaataacatggattttttttaagtgttgaagataaaatgtttataattttttgatttttggataaacggataaagtgtgatattttgattagcaagcttttaagtttttttttaagtttgctgttataaaaaaaaaaaagtgaaagtaagtttaaaatgatttaatgtctgattgaaattaggatagtttaaggtacttttagcatgaacatgcttcctccaaagtaatactcatggttttgtttgttttaactaataaatcgttacttttgaaatgacacttcgaaaatcataaaacctaaaaataacgggttcacaaacatgttcttcgtatttttttgactccaatgtacctttagaggtatttgaacgatctttcagacagactaaaatatgtctttctcattgtgtacattaaaatgcatatttttgtattgaattttgtaaaaatatttttgtaacattaaaccaaacatagcattaagaaattcagtttgcaaatttttgtaagaatatatataagaatttgatgactttaattagagaaaaattaaatggctaacaaagatcacatctaaccttatgtaccaaaacccattgctcctactcatatgtcgatcacctaaccttttaacgtgtcaaagatcaaactttttactggtgagaacttctacaagtgacaagaatgcatctattgatctataccattctaaacatgcatgaaattgcatcggcttttacggccttccacttttgccaatcctaaacaaattgaagactgaacttatgccaacaagacatgtagacacaccattatctatactttatctaatgaactctttgatgtctactatttctacaaagaagtgaaaaagatttgggactccatgaccttgaaattcataactgaacgaacattttccccccgtaaaattggtagttccataactgtaatttcactcaaaatggtaatttttgcatttacaataatagaaaccagtcttctcctcccagtaaataaacaaaaagcagacagatcacctcaagcatattagttcaccaaacagtttctcgcactcttttatacaatggaaaaaaaaagtacgaggaaaagccaaaattgcaatgctagggaaaattgttctccagaattcatcttttatgctcttcaaattattcattccaacctataaacgtgcaaacatgtcaaattatatatataatatatgatcgttcatcatctcatatcttccaatttggtgcagaaaattaagctttcaaattataaaacagagcaagatgggagtgtcaagaaggaattgacgctggttaagcaaaaagatgaaatctataatgtaataaagcataaaagatatcattgcaagcttaatttctatgcctattctattactaacgagaaaacaggaactgtaaataaatataatttttttattcaggaatcaaagataatataaaaaaatttacaacaattcacacacgttcaactaactaactgaattagaatctctcgacaaataaatacaattgaagcaaagtagtaatgataaaaaaatgaatgaaataacaatatttggacaatttttttctataaatattttattggagaagaaaataaaaaataaaaaatctttttttgtggtgaaattagctaaatcatattttctgacggaacaagccaaagggtggtggtggtggtgatgattcagaagtggcagccacagcaaaggtaaaagaaacagagggtggagacaaggactacagcctcagccgcgtagagtatcttgaaaacgacggtgtccatgatggtcgtttgaagatccagtcgtttccaccgaaacggccacgacaccttcttcaaccacagcttgctcttcttgttcttcttcttctcctccatcaaacttaaacacacactctattatgtaattttggacaaagagtatgagctgttgtttgtttatatatagaatattgagatagggttgcatgctttggatgcttcaaagacaaggatgtttgctggcccatgaataggttgaaccgttgaaccgtaaacaaatgctagcactttatttatgaactctacttttgtcacatttctcaattcctgctccttccgacactttgctctcactcattaaaaaattccaccaatcttgttcccgatttttagtttccgttataaattgtaatcgtagataaccagatttaaaatttggtaatggttacaagaattgtaaaaattgtgagataatgataaattgatatctaaaaggtaaaaaatttaaatttatttttttaaatatgtataaagtgtgatagattaattgtgtagataatataatagtaaattaatttttaaattttataacttaatgttaaactaatttttaaaaaatataatttattgttaaaatgattaatcacattttttcattcgaaaattaaatttaaattttttatcttattaaaataatttgttaccttcttatatttttaggtatcaaaatgattatatcaaagatatgtgaaatttctatgagatatttatttgcttttcattaaaaatgagttttttttttagagtttaaaccctttaaatgaatcttaaagggatttgtttcttactaagtttggagatacctaaagttaaaaaaaaaatgaaaatattggtaaaaatagtggagttgttgattctggtgtaaagtttcatttgatgtgtcgtaaatttgtattggagagttgttgggggaatgagagcgcgtatgagatttaaaagcttgttaaagatgaagagacatataaaagtcttcttttgttgaataactaattctgtaacaatttgatttgatatagaataccatatatcatgtgccagaaatgagaaagaatgactggcgtattagtctgattggtttgatttttatttaaaaatcatttaaaataaacttaaaaatatatttagttctgtttttatttaaaataaaattcaaatcaaattataaactaatattttgacggttgatttggtttgtgttttataatttttactaaaatattatttcattaatatttatatatattttttatattttaaataaaattacattaaaaaattgttcataataatttacgaaacttattaatatgttaatcttttataataaaatttttaaaattttatttattttaaactaaatatatcttaaaaaagtagtatgaaaaataaaataatatgtattgcataaattttgtatacataacactacaaaatattatgaaactcaagtaaaatataagtcttagtataagtgttacattttgtatcaatttcaaaaatactacaaaccaattagtttgagtaaaaatcatccaaaaaaatcaatttggttcgatttttgatcttttgaacaattttcaatttttattttgagtttatttgagtttgaacactcctaaaaatcaatgttatatgagaaagaaagaaatgtgatttttatccaatttttaaaaaatgagtatttaaacttatacatattactagagggaacatatcatatgagttattgtgagtaataatgaaagcattcaattacaattattaggttcaaattatatagattcctcatatacaaactgatacatttttcaagataattaaattaaacatatactgcccgttagtaattaaagtcgagatttgaggataaaaactattaatataaaaataaattttaaaatggttaatagtttgagaattttaaaaatacataaatattaaattatgataattaaagtcatgttttatcctctaaaaaattataataaaaagatgttcttatatttaatgagagtactgtaaattcatataatataaaggttggtaaatgaattggatcaaagcgcattaagttatgtttgtaatattcctcttaaatgtttttagttgctgaaaaaattgattttgattttagttcctacgatttttattttatttttgatatttcatttcatcgatatttatgtttgttgaaggattaatacaattctcatcatttatcaagatttagggtcaattattaaatcatatacacaaaatttctctttattgtttttatattttaaattgtattattattattctattaagtgatatgatgtgataattaaaaaaaatgtcatcgtttaataaaatgaaagtagttaatgaaaataattaaaagtgtacatgtacataaaattgtttaagacccagaaacatatttaaatattttcttacgtattgattatttacgtatgtatgcaaagaaaattgaaatgtaatattcccttacaaacaccaaaagtaatgtgattgtgatctttccagccaatctcacctttgtagaatatataattatatatgcctacatagtgcatatatatactttttatgaatttatttatacacaaaatccctcaatccaatattttgtataattgattttgtttgtttataaattaagacaactttgttactaatagaaaacatttttgcagagatatttattgttttattttggttgcgtggagcaacttgtttcccgcattgttgccgtgcactgcatgatgatgtagacttgacctggcttggtaacaaggctgtctatataatataactagcaagtctcaaattaacaaaaattcaacaagaaggggaaaaaatgaggggagcgtttcattttttactgattacaattctgatacgttgataaatataatggaggtgagaaaagaatatccggattacattttatgcattaatgatcataagaaatatataagaaaactgatctgtatacaggaataaggcatttttgtaatctttgatttattagaattacatgcattgagtaatttatgaatcctacatgtgttcataattatttcatctgaagatggtggtaaatatgatgatttaattttttgtcatgtgcaataacaacacttgtgtgaatgatggatgaatgactactaattcttggttattaattgttggtagctgaattagcaaatgtatgaatgaagatcgattgtattgaaagagttgtttgatatgtaactttcgacagaatttctgaaggattttttcgttaataatttccgacagatggactcataaaaaattacgactgatttttctgttgaaaattaccaacggatatatccatgaaaaattaccaaatgaataatctgtcggtaatttcggacataacttatcgacggatatatttgtgctgaccttgcagacggatccgcaggaatttttgatggacaaaaaaatccataaattaattttgcaatgaacgttttactgatagatttttgtccatcagaaaatttgaaattaccgacggaattttgatattaccaacgaattttggccgtcagaaattccattttttttgtagtggtatattttaaaacttccgacttttattaaaccatccttaaattaggaatacgtcctaatatgcataccttatttccttgttaaactgttcctactttttactcaattaaaggttgatataatctgatattaatttatgaaagacatgcctagaatatcataatattcaattgttattatgaagtgagtttgaataaaatcaacttataaaaaataaaattgaattaaatgtttttatgaattaaaatcaatataatgatcatttaaatgtattatataggagtagatttgtaagcatgctgcaaaagttcatatcatatccaccgtaagagtttataaaaaagataaactattttcataatttttattaatctcttcagaattctctttattttataattatgaaaaaaataagttactatattataataaagataacaatgttagaaaatatccaattctgaaaaaaaaaatccaaagatgtcttttcttgagaaaaatcttcaaatatctataaaatatcttcgagttttatttcaactgacttcggttcagtggaaaaagcttttattatctgttactcgtatatattatcatgacatcaaacaaaatattttgaaatagttgttattgaagagtttcttaacaaattaataatacacaattaagtgaaatatagaagaaattaatgaaataatccatcaaaattgaatctgatatcttttattcatttcttctataaatttctcaatatatattaaattagctcaggaattggacagatttgaacactttgtgctttattccatctcataatttcttttatttgcattgaaaaatggaattatgtactaattggaacaattttcttttgttctccgtgtaaagtacaataatatttctctagttattattaaatgtagtaatagatgacaatagtgttattttcattgaaacaacatcgtgtgaaatacatgttatgtgttggatatcctttctacctttgtccataactttatctatcaagtccttttttcttgtattttcagcaattttctcattgcagtgttgtcaaaagacaaattgacattatttcattgattccctaatttcactttggtatggtccctccaaaatgggtcaatcaagtggtcccagatactcatgtccacttatgcttaggctttagctaatcgttgcttacttggtttctccaactacatatgtccatttccaattgcataatggctactcaacatcaacaggagcacatttaattcaaattaattgaagttagtgataaatgaacctaaagataaatcgaaaaaaaaaaaacaaagatatcttttggatttaatgactaactacctattcataaacgctataaaaatataatatatcataaaacccttcaagctttattgtaccaaagccaatgacgtgtggtaagaaattcttttgtgctaaatatttttgatgaaccgagtagaattaaggagataaatgatactttcatttccttatttccaaaggttgacatggtgcatcggatgaaggatttcagactcattagtttatgcaatgtggtatataagattgtgactaaaatcgttgccagtagattgcggaacttgatgtttcgtcttgttttgccattccaaagtagttttgttccaaacagacatgcctcaaataatatttttgtggcataggaggtgctccattcgatgaggcacaagaagggtaatgttgggtgggtaaacatcaagattgatcttgagaaagtctataatagacttgattgaagattcgtgaaggagaccttggaagatatccaaattcctgcaaatatagtggatattatttggcactgcatatcgtccccaaagatgaaggtgttgtggaatggagaggttttggaggattttcaaccataaagaggtattagacaagaggatcctttaccctcatatatttgttttatgtatcgagcaacttttttcaacttgttaatgttgttgtggagaatgaattttgggagcccattaattcaactttctagaggtggccgaaaattgtctcatttgggttttgcagatgatattttattgtttgcagtgattacaaaggagcaggtggagactatcaagacaattctaaatttgttctgtgagagctctggtcagaaggtcagcaatgagaagaccagagtatatttttcaaaaaatgttgcatggcaagcaaaggaggagattagccaattattagggtaccaacgtactgaagacttgggtaaatatctaggggttcctatccttcataatagagggaccactcagacataccaattcatcataaagaaagtcaacgaacatttgagttgcttggaagtgagaactatatctgtgcttcaagcactttcgtcgtatgtgatgcaatctgcctggctacctaagtctatttgagatgcagttgatcagaaatgtcgtcagtttgtgtggggtgatattgatgaaagtaggagagtgcatatggcttcttagaaggatatctaatgatgcgtaaaatatcttaagctctcgcaaggaaaagtatacctacacaatagtaacaatgaatttaaaagtccaaatatcaaacccaaatgattattaaactcacaggaaagattattaaaatatttttatgactttgctttttataagataacaaataaaataatataaagagagattttgaattataaaaaaagaataatcaggattatgactcattagtatcaattttttctcaatcctaatcataatgaaatttcaccccctagttaattatcaatttctaaaatcaactaaagtttatgatcaaggtaagaagatgttctttgccttaaatcaatacaccaattatcatggatctattaacttaagtcaaaggataaaatcaattttaaggatgattaattaaagataactaatatataaagattatccaaatagtttgatcatgtaatttggtacaaaacattttctatataaatctaccaattacatgtcgatgatcattactatgcaatcgattgagtattagaatgacttgtcccaaataaatattaaaagaaagaaagttaattaacataaaccatgaagaatttcattaaaaacaatgaaagtgatacagttggacaattacatcataactttcggactaagaggactaactagccatgatcagagcaaaactaaccgttcaattatataaaaagtaaacatagacatcaataagaagaaacgataatcataattcgtcctagtgatgttgttcacactcttcagctctcaaaagccctcaagattttctcaaatttgtaaaaaaataaaaataaaacttaaaaataaagataaaacaagaagcctcattctttatttataatattgtggggagggtctccttgtatctttttttaattaaaaaatattatcaagtatgatttaaattaattatcgccttcgtacaaaattatcatgaatgattagcttcaacaaattcatgatgtttaactattttttatgaaaattcttaaacatctatctttcacaaacttacgctaaaccataagttttgtcaaataaaatatatcaaaatgcattaatatgacatgaaaacttatataaaagtaaaatcaaattcggatttatcatttatcaaccatgtatcaatggtgagttgggcttaagagaaatgcgtgtggtaaatcaaacttttatgctgaaaaatggatggcatctagttaaaaataccgactctctttgggttcgctaggtccgatcaaagtataattgaggtcacctcaatattcctcttaattgatgcagggaaaaggggatcaaatctttggcagggaataaatgcggtttggccaaaagtggataacaatcttcgttggaaggtaaataatggcagaatggtgagattttggttggatctgtggattccaggtatgaatagtattgctttgtctattaatagtagtattgcggattcgaaaaatcaaaagatggtggctaactatgttggtgaggatggtacttgggattatcgcaggttgaatgctttgttacctatggatattgttcacaagatccgtgctgtgtgtgcctaatgttgattttggcaatgatgtggtggtctagaggggttttatggaaggtagtttctctacaaagaatgcgtacttatctctgattcaagaaggagatagtatgaatcaatggttgtataaggctatttggaggttgaaggtccctgagagggttcaaatgcacatatggttggtggccaggaatatgttgctaacaaatgttaatcgtttcaaacgtcacatgtgtgactctaatctgtgtccagtttgcttggttcatccagaaacgattattcacttcctgagggactgtcaacgattataaagctgtgggatcgtgttactggtaaccaggttccaactgggttttatgtgggagatttggtggattggatagataacaattagctaaacaaattaagttaggagaaaattgggtgatatgcccaaaaacactcaccactacgccaaaacatcaagttgtttaactaagatataactcttgacatatatgcccagcatagaggcaagctattaaacatgagcagctagtttgaacccaacccatagactctaatgtaccttcacgaccctttttgaacacgtcattcccctctctattggagagggtttgccctgaaccttaagatcatcagaaacaagtcgaacctggaattcaaacccatgttggctaactttgttaccaatgatataactaagaaagtccattatactaagtttaagctattagtaacagcgtaactcttgacatataacatcctatataagctgcagactcttgcatatttaagtcacgttaatcatgggccaccatgctaacccaacatgcatcctctaggcaaatcattaggtttgttcaaaatttaactatttagcaaagggataacatacagccacgtaggcctagtgctttgtagtaagtggaaaaaatcagctagctgcagcagacaaaccaaaggaaaaaaagtgatatcccctaatatcaaataaagctagatcactttatataacatccattgagtatacattgagtgagaaaccatccaataattctgagatgttcacctcaacaaattagcttcataaataaagcagatcaatcacaagaaagagtttgccgcatcaaaatagagcgaaagcaaacaccatatccatattgggtcaagcatcccattgatatagaacacgtgcattcaaagataggatatagaacaggccaaagaacatttcataaaattgcaaatgcagaactgattacctgctaatatttatattataaattactattaaagcaaaatgtatgaaatacataagaaaattaagaaaataataaaaacttcggaagaaactggatgtctacacagttctacttttggccatcagtgtatcatcaaagaggaaaatcaaactctataccaaaataatgcagcaacttatctactttgaaatactttaactgttcagacatcacacccaccctcaatttttactgcactgtgcatatcattaatattgcaccaatcgcataaaacacattacatccaaggatgaacaattcatccaggtcagaatccagtgattaaaaagatattcatacttctcgtaaaataaaacaatgatccagaagcaaattcccattctttgtaggtgttggtgataatcaaaaataaaatgagtataggatgcaaacacacaccaataagaaatagaagtaactatcttttctttatcaacatccttttatccaatttgcatcagaaatgaaaataatcatccttaccattcagttcatccaaagcaaggcaataacagttcattaataggtaacttggtactgtaaatattcatcctcatttactatcatccctagtaattaattacaagtagcagcatgcatcgcccaagtggagacacgctgctacaatggtggcataaaagatcacaaagccgcagctatgctggcactgtggtgcatcacaaatggagctccagcagaagctggatgccactccacacacacacacacacacacacacacacacacactaatctatagtgcttacaattaactactgtgctcacaccaccaagtcatggtgaaatgtaatcaaccatcataacaacagttaaaataattcccagcgacaaaacaataaagacactgaaacacaacaatcaatcttgttattgttcaaggagtgtcaatattaaccaagacagcaaagcaaaaaatcatgtctaacgagactcaataaatctacaacaagtttgcacaacagaattcaaccaaagcttactattttttcaaactaaaagccatatcaattctttctatcatgagcaaccaaaccaaccattaaatcaggtggctttggcaggatgattccccttggcctccccggaacaacagtcaccgtcatgctggtggtgatggtgatgatggtggtgctgcttccccttgagctgcttcctcatgtcataagcatcctccccgtcggcataatacttggcctccacatcatgaatcttgtatcccagggtcaccgtgtacaaattgaaggccgcgcggttgctcttgcgcacgtgcagggacacgtactcggcaccaaacacctgcagcgatcaatcaaaattgaaattgaggggctaaaaacataatcggacgcggcgactaatttgtaatttgtaaatggaaagaaatgatgggatgcctgttccatggcgttctgggcggcggtcatgagcttggtggcgaggccgagcttgcggtgagtgcggaggacggcgagggaggtgatgtggccgtggcagtcggtggtctcttcctccatcttggcgaggacgtagccgacgatgcgggcgttgtagtcttcggcgacgtagaggaggtggggccaggagaggatgtgatagaggtagtacttcatctggtagttctccggcaggcagaacaggttgcacgcctgcatcgccagtaggtcattcaccgtcgccttccttatgcacaccattttttcccctttcctttcttctctctcacgattagggcaaacacgcaacgcaacacctaggagcagtgttttaagaactggggagccgattatcgaactgctagacttattaggttaatgggtcacgggtggaattggagttctactgggttaatggatcttgggtcaaattagagtctcacttctcgaatcaatttaggaccaacaagcaccacaacacttaggagtagtgttttaagaatcatatacaacatcgaatcggttgagataatgacttaatgagttattgatggaaatcgaagtctcattggattaatgaattattggtcgaatcgaattaggaccaagacacaatgcaatgcctaagagcagtgttttaagaactagacccatcatccaataagtgagacattggattaacgagtcattggtggaatcaatctcactaatcaaatcaatttgacttagtatatattaaaacaatataaaaataaataactaacataatttgattaattaatatgctaaatttaaaatgatcatcattataagttatttaatatctcaaataataaccaatattcatgtcaatagaaattcaagaataagtttcaaatacaaataaatatccaatgtcttaaaaatatacttttttatatacataataatttattttttaatatagatccttagttattaattaaaataaaatattatctattattttaaatttaactacatatttataaaactagtactttcaattattactttttataaaatatattttatagtactgaagattcaagtgaagattaattatagatttgtttttcctatttaattttactaattttactctataaatttcctttaattcctttgcaatgctataaaaacttgttttctgtttctgtactgctcctctgtattgtgtcacttcttggtgttgcatcgttatgaggtctcacacaaaaccctatgagagtctaccatcctagctttgttggtgttaatatattttttcttagttattcaattgatgttttattagtacgtaaaaatctcacctttaatggaccaagtttttttcttcaaaatacataaaattcttaaccaaattaaaagaaatagagtttaatcatataaaaataaaaaagtagtgtgtgaacaaaatttaaaccagataaagtctaaaaatagaaagagttgaagattgaacataaatagaaaagttataaaatcaaatagctagtttatcacatgtataaagagagagagcaacacacttctatgaattcggaagtgagactactgaaaatagcattgtaagatagacttggtctggcaccataaatcattcttcttctccgtcaacattctatactctgacaaatctctcattgtcaatcaaacttcttctctctaactacttttgttctcttaccatgaataatttgaactttcattcttatctttcagtgtagctataacatgttcaacatccaatagatcttgccacggtaaattaatgttggtgtatataatttcatttacatttcttgttccattaatttctcttcaggaatcatcaccaagctatttatcaatcaaaatggaaaataggctagcactggaatacaatatacatgtagattttgttgattaattactagaaaaagtagtaaattatataggtgtaggtgtaaggtgtagcaattagaaacaatgtcatccattaataggcaaccttcgaagaaatctgcacgtagttctggaggatcaacatctcaagggtcacaaaactctagcgggccaagtgttaagtttgcgagaagaacttcaagtggaagatatgtgagtctgtcaagggatgacattgatgcgtcctcagacttatcaggggattacatgaactacactgttcatatacctcctaccccagacaatcaacccatggactcatctgttgcaatgaaagctgaagaacaatatgtttctaattctttgtttaccgggggattcaacagtgtcactcgagcgcatctaatggataaggtcattgattctgaagtcactcatcctcaaatggcaggctccaaaggctctgtatgttcaatttgtgatggcagggtcatgagggatgagaggggacatgatgtcactccctgtgagtgcaggtacgtgttattattaggtcctcataatcctaaggacattatttaaggaattaaaaagataaaataattattgtaaaaataatatgaaagtgtaaaaaaattatgtaaaaaacataattttctgtctctgaataagaatttttctcttttttaacttcttaactaatgtctcaaggatacttgttagcatttgtcttatcatcatttcttaattttgacattatttttatttgatttcttgttgagaaatgaagagaaactaactaagttacataataataattcaaatttaggtacaagatttgtagagattgctttatagatgcacaaaaagaatctggtatgtgtcccggttgcaaggagccatataaagtcggggaatatgaggaagacctcacagatcagtattctaacaatggggcattgccattaccagcgccagatggttccaaacgtaacgcaaacaacatgtcagttatgaagagaaatcaaaatggagaatttgaccataacaagtggttgtttgagactcaaggtacctacggagttggtaatgcatattggccccaagatgacatgtatggtgatgatagtgatgatgccctaaaggcaggaatgctggatcaagagaagccatggaagcctttgagccgggtaataccaattccatcaggcatcataagtccttacaggttaattaattatatcaattatttatgctgcccatagtttgtaattataacgatcataataataaggtttaaatacatttttcctttatctaatttaacattttgttcattgttatctttgtatttttttattttagttttttaaaatgtgtttgttttattttttatctgtaaaatgttttagatgacaaattttttatagtataattcaaaaaaatatttttgtactgtttaaaatactatatatttctttaaagatgaaaaatacatattattttacgactaaaatgaaaaaaataaaaaaataaaaataaaaaaatactaaattgcataaaaaaatgtatttaagtctaataataataattacatgaccaaatctatgtctatgtatctatttgcaggttacttatcttggtgcgacttatagtattgtgcttttttttacactggagagtggtaaatccaaataaagatgcagtatggttgtggcttatgtcaattacttgtgagatatggtttggcttctcatggattctagatcaaattccgaagctttgccctgtgaatcgttccactgaccttgaagtccttcatgaaaaatttgatagtccatccccatcaaatcccactgggcgatctgatctacccggtatggacatttttgtgtccactgctgatcccgagaaggagccacctctaaccactgccaataccattctttccatattagcagttgattaccctgttgaaaagcttgcatgctacgtttctgatgatggaggtgctctcttgacttttgaagccatggccgaggctgcaagttttgctgatttatgggttcccttttgccgaaaacacaacattgagccgaggaatccagacacatattttagcttgaaagttgatcctaccaagaacaaaagcaggacggattttgtcaaggacagaaggagagttaagagggagtatgatgagttcaaggtacgtataaatggccttccagattccatcaggagaagatctgatgcatttaatgctagagaggagatgaagatgatgaagcatatgaaagagagtggagctgacccttctgagtctgtcaaagtgttaaaggccacatggatggctgatggcactcactggcctggtacatgggccaatccttctggtgaacatgctaaaggtgaccatgctggaatacttcaggtaccacacctacctagaaatttttatttttttaattttgagaagagtttagcttagttgaattcagaaactcacatagaatcagagtagaccttacatattatttaccaacaaggtttatggacattgaaaatcgaactcatgtcttttttacgaaatgagtatgttagttatcaactggaaccaacctttgttggcacctagctagcagtttctatttttatttttgaaaaaagtttagcagagttggatcacatagtattacagcttactcttaatatattatacaccatgaaggttctcacgttagtaacgaaaatcaaattcatgttctttgtgaaacatgaatatattacttaattggatcaaccatgtcaactagctagcaatttgagtaaccaataaaataaaagagatatgacgtgcatatccaagaatcaatttaacttaaatatatataataatagtattttaatccaacttttttgcgttaatgaatgtaggtgatgctaaagccaccaagtcccgatccgttaattggaagtgcagatgaaaagattctagacttcacagaggtagatacacggttgccaatgtttgtatatgtttctcgggagaaacgaccaggttacgatcacaacaagaaagctggtgcgatgaatgcattagttcgagcatctgcagttttgtcgaacgggccattcattctcaaccttgactgtgaccattatgtctataactgcaaggcagtacgagaagggatgtgcttcatgatggacagaggcggcgaggacatatgctacatccagttcccacaaagattcgaaggcattgacccttcagatcgttatgccaaccacaacactgtgttctttgatggaaacatgcgagcccttgatggtcttcaaggtccaatgtacgtgggaactggatgcatgtttcgacgatttgctctatacggattcgaccctcccttcgtggacaaggacgccgacaagaaagatggtaaaaagattcaagggtccgaaacgccgtccatgaatgccagcgagtttgatccaaaccttgacgtgaacttactccccaagcgctttggaaattcaaccatgctggctgagagcatacccatcgcagagttccaaggacgtcctttagcagatcaccccgccatcaagtttggacgtccaatcggtgttcttaggacccctcgcgagccactcgatgctactaccgtagccgaagccgtatctgtcatttcttgttggttcgtctttctctatattaattagaatagttatcttgaacaagagttttctctttaacaaaagcattttattttctcaaaagagttcttaaagatttttcttaatttattgtctatgtataataggtacgaagacaagactgaatggggagacagagtgggatggatttacgggtctgtgacagaagatgtggttacaggataccgcatgcataaccggggatggcgttcggtgtattgcataacgaagcgagatgcatttcgtggatcggcaccaattaatctcaccgatcgattgcaccaggtgctgagatgggccacaggctcagttgaaatattcttctctaagaacaacgcattcctcgccagcaagcgcctccagcttctccagcgtctctcttacctcaacgttggcatctaccccttcacctccatcttccttgtcgtgtattgcttcctccccgcgctctctttgttctctggttccttcattgtcgaaaccctcagcattgcctttttaatctacttgctcatcatcaccgtatgcctggtgatgctggccattctggaggtgaagtggtctggtgtggagttagagcaatggtggagaaacgaacagttttggctcatttctggaaccagtgctcacttggctgctgtggtgcaaggactcctcaaggtgatggcagggattgagatctctttcacgctgacgtccaaatcggccggggaagatgaggatgacatgtttgcagatttgtatctagtcaagtggagctcactcatggttccgccaattgttattgctatgaccaacatcattgccattgccgttgcgttttccaggactatttacagtgccaatgcacaatggagcaagtttattggaggtgcattcttcagtttctgggtgcttgctcatttgtacccttttgcaaaagggttgatggggaggagaggcaagacacccactattgtgtttgtatggtcaggtctcattgcgatcacactttctttgctttgggtttccattagcccgccccaaggtgctgaaggacaaggtgtagggggagattttcaatttccatgaaataacaatgttattattgctaatgcaaggccaggtgggtgggtgtgactcatgtttttagtttttctttttgtcttgttattatatgtacgtaacagtcatgtatttttgtaaaccttcaattcacatgtcttaagtacataagtaggaaaagaaaaactagtcttagatcgaggtttttttcttttgaaaaaaaaggtcaaagcaataataatactattaattagtttatacatgacgacatgattgatgttcataatgtgcatctgtgttagttgttactgtcattgagcattccattttttccatcctcaaaagcattacatgtttatgttgtttgatttattcagtagagtagatgaattgttaaacatcttagtaacttaaattaaagtgaactaaaggaaaaatgaagttcaaatgaatctgaaaacggactaaccttcaattgtttcactggtcaaattggtgccagaagaaaagggtttggcaagccttttacaggtacaattcataattcctcaaaatttaattgagcttaagtacttaaaaaaaatggtaatcaatttggcaaaatattataattaattcttcttactgtaatcttacaaattacgtgctgcttaagcaactaaacatcagtaaagtaatcaatttgtttgggtatttgttgtagctctaattgctaactttacttacaggaatgggctgccctaataagtggctcgctgttatgggctatatttttatttctgggtacatatgggctgtctaatttttgtatttacaggatgtgccaatcctacgacaagaaaagaaaaagaaggaaaagaaaatagtggaaataaacaatatcaattattttaatgtatggaaatttttacaaaatataaaatgaattatgtagtatatgatacgcagagcattgagcatgtgctatgaaattttcgacgagagtatggatatttttaacgatttacaaaagtctcaagatggtttaaattttcaatctttttgaccataaaaatctcaagtaactagattgagccatctcggagaaccctctcatttggcttttggtcttttttaaaattttacgaatacaaaatttatcacataattctcattgttacgtgtaggagaatgttaattagaacacttgtaaaaaaaataaaagtgaaaaattgttattaaaagtaataaaattgaagattattaacatctttatgcattaagttttaatgatgcttttatttttttaattaatatctttaaactactcgtgaacggttcctaaattttatcaaagataacaaagaagaagcaagacaacaagcaacgtgtttctttttttatatatcaattggaatcgattcagtgaatcagtctaaaacaaaaggataagtgtgacgaagtaccacaaacactagtttgtctgcttttgccaactctcacccaaatagctaccttctttgtctgattgccaaaggagagggacgtgccaatgaaatcaatcgtatcgaaactaaaatttggtgcaatcaattcaatgcattactagctatttcggaaacgcatattttgtaaaagagctctaaaacaatgaagggaaatatgttaagagaagagataaagtttggttgatggtggttaccactttgagggatgatggctcacttgccacaaactttcgcatcaaacacatgggcgacaccttgatttttaaccattttgttcaaacatatcataggctttggtgagtgccagacaacagaggcaaatttttaaatatataaaactgttcaaaagtatgaattttatgttataatgcgtcatcacatttatttaatgagtttttttggtaatttatttatttatttaataagtttgaaaatacataagatatcaattttattaaagtctaaaccatattttttatccgtaagaatcataaaaattaattatcaaaagattcacaataattcacatatcaaatctaacaaattaaggtaattaaactccattgacaaagcataaaacatatattagatgattgtgcataactttaaaatctgtatataaccaagttgatgactttatcttgcaggaagcaagtggagttgtataagttgcatatcagcaatagcatggagaaatgacaaagatagatagtgaaacataccaaaaaaaatggtgctagctagtgagtgctgaggacctgtagttttgtgtttagttttttcaaggaaaagctgatactagaacttataagagggaggatataagagaatgaaaaagaagccgataaaaaaaagagagagagagagagagaatgaaaaagaattgtggaaatttaatcccacactcaattcatattacctaactttataattgaccaacctttaattgctttattatgttgtatgggatatgagtacaagaaatgaatatcatatgtaaatacgatgtttttttatcataaaaaaataggatataagtatattactgtatatatgttataatgtttaagctaaatgtaattatagtaatatattttcaatattttattaatttatctgttctttttttctttatattttcttaatttgttattcatatgcatttttatcattattgtattatttcttacacaacttatgaggaaagtattgtgtagccaagtttaaataaatatgttataactcaagttatggtaatacatgttttaatttatatagaattgttagaatataaaatattcaagttttgatacacagtcactcttataataacatattgatagtccatatatatcagtatgacatggataagtaatcaattttgaaatatggattactactagaaaataagcttttaaattggttgttttcgactttcaacatcgatgttaacatcagttttcaaaaagtgatgttaagatacactatacaacattaatttttaagaaaatcatgttgtataataagaaataaatcaaaaaatgtaaaatatataaaaatcaatttcgatatttaaaaaaacaatgttatgatatacttgacaacatcgatttttctaaaaatcgatattgtgttgcacacgacaacattgattttcaagaaaattgatgttgtcaagtttaccacaacattggttctttaaataactgatgtggataaacactttctacatcagttctgccaaaaccaatgttgaatagtacttacaacatcgattttgttgaatagtacttataaaaccgatgtggaaaatgattggtcttgtcggtctttgcgaacttggagaagagaaagagagaacaaagaagtaggaaagcacaaagtagcaaagagtaagcacgatgttatggtaaaaacatttagtcacttgagttttaatttagtaaaaatccaacatcggttattaaaaaccgatgttaacaaaaatcgattaacattggttttttataaaactagtgttaacatcgtcatgttaacatcaatttttttaataactaatgttaatattgtcacgataacatcggtttttgaaaaatcgacgttaatatcactacattaactttgatttttgaaaatcgatattaagagcgtcacgttaacatcgatttttttaaaaactgatattaacaaaaccagtttatttataaaaaaaatgttatcgcccttttgttaacatcgattttatcaaaaatcgatgttaaagtaagaatattgaaagcattctttctagtgcatgcaccatattcaatctacaaagtggacattcatacatattactaacttacttaagacaaatattacaattttgaaaatttagaaaatagtttaatcttaaaataaaattttaaaaattgcaaactacaatgaagcaaaaagttcaaaggaagaggcaggtttatacatggagtaatgtgatttacacatcaatttttttacaataaacacacaagataaagagagatgagaagagaaaaacaaagtgtatatatatatatatatatatatatatatatatatatatatgttagatatataatatgaccttgagaaacaaaaaaaaaaattaacacttccttattatttaagatttaaaagagagaaatagatacaagaaataaaattattataataataagtaataaatcctccgcaaaacaaaacaatataaaagtagtattaatatcctagtaagcaataacacactctttatcaaaacatactaatcttgtgattggtgttctttaatgaataagacacacgtaaaattcagtttattaattaatattaatgagtgcatatcatgaaccacacaagacaaggcaagacacacaaataagaacaaacgaatgaagaatatgcggggctcatcattccgtacctaccatgtggtctggttctcttcatctccatttccatttccttctccttctttctttcctcttcaacatgtcataataaaattcccactcatactcttctttccaacacaaccaaataatctcttgcaccttaattctatcgcatactctgcctcttgattgcataggcacgtggacggccatgtcaatgaattcccacgtaaaattcatgaaattccccacgttctaaggttttgaagtgtgtttgaagacaacactgcactgcactagtgttacacacatatatagacaacaacacaaaagaaactttgtgtgcatatatatatatattctaatggctggcaatgaatggattaatgggtaccttgaggctatactatccactggaactggggctggcaccgttgatgagcaaatgcaaaaagcagtggctccaccagaaagtgcacattttagtcccacaaagtactttgtggaagaagtggtgtccagtgttgacgagtctgaccttcaccgtacatggatcaaggtggttgccactcgtaacaccagggaacgcagctcaaggttggagaacatgtgctggcgaatttggcatcttgcccgcaagaagaaacaggtaacaatcatatttcatttagtgctaattgcctaaggttttgtttgggagttaggagaggaagggaaggaaagagattcaaggggaagagaggggaaaaaaagggaggaaaatgagggaagttccttcctccttatttgagagttaaaaatatattaagagagggaaattgagagttaataagatattaaatatgaaaattatataatttaaatgtaaaaatatattaaaaatatattaaaaatatatttttgaatatgtagctgaggtaagataataattttaattacttttccttctaaaaacctccaaattgggagaactacaatttgtaggctttggcagatttcagataagttttaaaaatcctcaaatcttttccctcaaaaattaaaactctcaaacaaagagatgtctttacctaaatctttctcttctctctcttcccctctaaaatccctcttccaaacaaagcctaaggttcgaaccctgcagggagagttgtttacatttagtgtctgacaatacttcaaacaacaaacaagattggttctgaagaagaatacttgttaggaatgaagaaaaaaataacactaaacatgacaataacacttgatttgaaagtagaattgatagtaatatatatgtacatgtgcacgtaagttttttaatgtttatttgtttgattttgttgaatgctatgcaatagaatctcgagtggccaagcaaaatgttgtttggtttaaattgtaaattttcatttttgttgtatttgctttttcattcgatgaatttgggggaagtatatatatatatatatatatatatatatatatatacatataccagagtgattgttagtgaaattaatggggcactacttgtagttggaaggggaggagctgcagagattagcaaacagaagatgggagagagaacaaggacgcagggatgcaacagaggacctgtctgaagagttgtcagaaggggaaaaaggagatggcattggggagatgatacaaattgagacatcaaagaaaaatttccagaggcagatttccaacttggaagtatggtctgatgacaaaaaggaaaagaaactttacattgtcctcttaaggtatattaattcttcactttctcacaatcattttgcattcaataaatgtgtttagccaaatttcttgattgtgttttactaaggtatattgattgtttgactatgacccttgtcgtttgacagtttgcatggtttggttcgaggagaaaacatggagcttggtcgagattctgatactggtggacaggtattagacattgctacatgaataagctgtgacccttccatttagtgtgtgttttgatgccagttggtgagagaaattattagatggtctgagatgatcattgtcctattaatcttcacgtatatgacaagtaatgaactgttattaattctttttcataaatgaaaaaattcgagtacatgtcacatagattagtcaaaactatggataggtgatagttctaaattatctaataatttcttggttgaagtagcttaaaaatacttatactctcaaaacgatcaatcttccttctcattttttgtcttggaattcaagaatatgaattggaattcccaaaaacatattcccaacttttatcaaacatagccttaattggtgttcaacaatgattcaatttcaaccaatatgttttttccagattaaatatgtggtagaacttgctcgtgcactagcaaaaatgccaggagtgtatagagtagacctcttcacacgccaaatctcatctcctgaaattgattggagctacggagaacctacagaaatgctaagtgcaggcacagatgaggatgatgataacattggggagagcagtggtgcatatatcataagaataccctttggtccacgtgaaaaatatctacagaaagaacttctttggccctatattcaggaatttgtagatggggctttagctcacattctcaatatgtcaaaagtattgggtgaacaagttagtggggggcaacctgtgtggccatacgttattcatggacattatgccgatgctggagatagtgctgctcttctttcaggtgccttgaatgtgccaatggtgctcactggccattcacttggaagaaacaagctagaacagcttcttaagcaagggcgtcaatcgaaggaggatatcaactcaacatataagataatgaggagaatagaagcagaagagctttccctagatgctgctgaacttgttatcactagcacaaggcaagaaattgatgagcaatggggactttatgatgggtttgatgtcaagcttgagaaagttttgcgagctcgagttagacgtggtgttaattgtcatggccgattcatgccaaggatggcggtaagaatgcaactagggtcacacactcacactcaatgtttgaaagtcttttatttcttaaaccttggtgaaacttctttggaaaaggaaacaactatgtaccaactttttcaagggatggttatatcagttactttatttggtgttttcttatgcaccttagcatgtcttaaattctcaaatttaagataacgtgttgtatgaagtactaatggttcaaacttatgtaggttatcccgcctggtatggactttagcaatgttgtgacacaagaagatggccctgaagttgatggggagctcacacagcttactcgtggtgttgatgagtcttcaccaaaggctttacctacaatctggttagaagtgagtaactaacatgtctacatatcttggattacattgagttcttcataaatacttataggagaagaaaataagaaggtaaaatgaattaaatttctcctataagttaaaatcactttatgtattttaacttttttttattgaagttttcttatgaaagaaatttgattcattttgcttattgttttcttccttagttcctttataaatccagagtcaatgactagccttgtcaagttgtaactgataactttgtgcaggtgatgcgtttcttcacaaatcctcataaacctatgatcttagccttgtcaaggccagatccgaaaaagaacataaccactttgttaaaagcctttggagaatgccgtcccttaagagaattagctaatcttgtaagttgacataattcaactgctcaatacttggtggaaactatggttgagaacttgtaaaaaggactaatatgttttcaaacagacgcttataatgggaaacagggatgacatagatgaaatgtcctctggcaatgctagtgtgctcacaacagtgttgaaattgattgataagtatgacctgtacgggcaagtggcatacccaaaacatcacaaccaatctgatgttccagagatatacagatttgctgcaaaaacaaaggtataaaatttattgaagttttagtatatgttgagatctaacttcttatgtgataacaatgatggccagctaactagtttgaaatttctctcagggtgttttcataaatccggctttagtggaaccctttggccttactttaattgaggcaggtttttaactaactagccacttttgtaatattatccttattttgatgctgaagtgattattgaatgtgcttaaactcatgcaggcagctgcccatggacttccaatggtggccactaaaaatgggggacctgtggacattcatcgggtaatttaagaattaagtttagatagtcagttgcatgatgcatgctaggaagttcatgaattatttgtcaaatggcatcaaagcattggaaaaaaaattgtaaaccaagatttgaattcccactaggagagttactcacatttagtatctgacacggcctcaaatatgattgtttccgaaggaggaaaccaaaaaaaaatgcagtatgtagtgatttggatattaattgtacatcccatatttgctttttcttgttttatttattttggaaatcaaacaggatgaacacctaattaggtctagctccttttgaattgtgatgttaggccctgaacaatggtttgcttgtggatcctcatgatgacatagcaattgctgatgcattggtgaagttgttgtcagagaaaaacatgtggcatgagtgcaggaagaacggttggaagaacatacaccttttctcatggcctgaacactgtcgcacttacttgacccgggcggctgcctgtcggatgaggcatccacaatggcaaaccaacaatccagaggatgataaagctgttgaagaagaagagtctttcaacgattcgctcaaggacgaacacgacatgtcccttaggctctcaattgatggtgacttgactgcagcaagtggaggcactggtctagatatgcaagaccaagttaaacgcatcctaagcaagataaggaagacagattctggctcaaatggtaatggtggtggaaatatcaatatgcttcttgacaatgtaactagcactagcactaacactaacactagcaaatatcctctattgaggagaaggcgtaggttgattgttatagcacttgatttgtatgacaataatggagctccagagaagaacatgattgagatggtgcaaaagataattaaagctgtgcaactagaccctcaaactgctagagttacagggattgctttatcaactgctatgccagtgatagaaacagtagagttccttacatcaggcaatgttcaagtgaatgagtttgatgctttaatttgcagtagtggaagtcaagtttactatcctggcatcaatacagaagaaggaaagcttttgcctgatccagattatgaggtacatattgactatcgttgggggtgtgaaggtcttaagaaaaccatttggaaacttatgaatggtgatgggaacagccccattgaggaagatctgaaatccagcaatgcacattgcatctcatacaaaataaaggatcttagtaaggtataaatcaacatgacatttaccattatattaagttacataatggctagctggaggcactaagagataaatgataatcatgtgtattaaattcaggcaaaaaaagttgatgagttgaggcagaagcttaggatgcgaggtctacgttgtcatcctatgtactgcagggggtcatctagaatgcatgtgattcctcttcttgcatctagagcccaggcactcaggtaattaacacttcatccttaatttctaactaattttttcaatcaattcataatataaaacaagtaatattgagtacattattgatttcacgttgagtcatccaaaatcacattaaaatagtatcaattaacatgcattttaagtaaatgttcatgtgttcaatttcacgttgaagaattgatagcatgttatgatctagttggtttaaaagttgcatcaatttcacacacacttaacataaaaagctaagatagatagtttccaaatatcatgggcatgttctttgtgcgagttttctctcgaggaatgtcaaatcaaacgcaacatgattctatggctagaaccgattttagttaaaagtaatcttatttcgaaattttatacaaaattttattacttggttttaagaataaaaacacccaaacttaaatatacgacttcaaaatcaattatatttagaatcaatttaatttgaaatcaatttttcaaaagttagcctaatcacaaacagaatgtttattatttgcttaaatatgttaattaggtatctctttgtacgttggagattgaacgttgcaaacatgtacgtcatccttggagaaaccggggacacggattatgaggagatgatttctggaactcacaagaccataatcatgaagggagtggtgtctaagggttcagaagagttactaagaggtccaggaagctaccaaagagatgatattgtcccaaatgagagccctcttgttgcatccattactgaaacaacacatgaaaacattgctaatgctttgaagcaactttccaaatctggaggaatctgaagtgctacgtactgtatattaagtgcattttctttgctctctcttctcaaaacaagtaataaaattatgagagtggtatgtgaatatcttcacatatgtggccactttaatatattacacacttcatcaatatctattatttttctgtattttttttcttcttatcggatcatttcacttattatatatactcatatttatatattttttttctctttttctctctaggtgttaaccagaagattggtccaccaatcttttcctaaatttatttaccaccacagtcaaaaagaaaaaatgaattgatgtaaatgatttgttacctaatgcatatattaaatgtggctaaagtgtagctagatcatgcttttctttgttacaaaatgtttttcttgatagagcttcaagaagttatatataatttctctaaaatacgaataagaagttatatataatttctctaaaatacgaataaattgaactcgaaatttttgtgcaatcacccgagaattgagatagttaaattttactaaaatagtttcattagcacccgaagtattataagacaaaaccctccaattgtagcagcatccgttaaaatttgtctttttatatatttacctcggtgttatgtgtgtttgagaaaacagagaaatttatgtaatgagactttcctatttaatgaactgaatttttggtgattagagttcactccgtaatcctaatgtaataatgtgaagtatatatatatttttacatttggagatcaaatagaaacttgatgtaaatttgagagatataaaaatacttaatttaaaaaaatgttatttaattaatttaatgtgtatattgttgacgtggatgtcattaagtagccacatcaacaatgcgtttaatatatgctattatataagagggatgaaaaagtattttgcaaaattggagaattaaataaaataatttttaatatggaggaaaaaataaaatgatacaaatttgagggaaaaaacatatttaaatttttatatcacttgaactaatttactttttttatccgattaagaactatctatgcactctgtattagaaaattcacagatgttgctttcaaaaaaataatagtattgttagaattcaaattataacaatttattgatatattacatgtttggcccacaattaaactaattgaataatatatcttttcgattcacatcgttaattataaaacctcatcattcccgctatcacagggggaaataattacttttatctttgtgaaattataatatttgattaaattgctactttatacatttggatattttatatttgttgactatatatttttatattaatataaaaatgttgttccctatgaatttagacttgatgaagttattattgaaatactaaatccctatatgcaagagttgagtacaccggaaaaaaaatgcaagagttgaaccatatatataaaataatatctttcaaatgtggataaaaaggaataccttgacaatagtttgagccaatagtaattttaagctcatataataatagataataaaaaaatagtaattctaatagtaattatttttaaaaaaaaaaagtgaggaaaagtgcaaaggttttgtccggattatctttaataaaaaattatgcttcgaatcaaagtatctatttcttcctccattggtggctttttgtggccctctaaacccatactcagaaaatgcacagtttttaactcaagctttcgattttctctcaggaaaggtctgaagatcaagcttagtcaaaacgtattgacaaaattacctctctcactatagtcacccgaattttatatcatgcggggcatagttaaacatcaaggcatgccattatctattaagggcaaaaaaacatacctttcagcaagttatattcgcctaatatatgtattttcaataagttggcaactaaaagcttctgactttgacccatttaatctaatctgaaagggaaatttagccattactggtagagaattaatttcttataataataataataataataataataaattatatatgctattggttggtttacaactttatataaaaaaaaagttttttttcttaaataaagtggttgatctttattttcttaaccttatttgactaaatttgagttgattaagaaataatgcaattttattacttcacttttttccctccaccatgtttttgtgtttatatttgctggtttttttcccataattttaaaaaatgttatttcttactagatattcaaatgttgtaatttttccctctctctctctctcaataatatgaaataattagtctaggattgaacatatcaagctctactaggaaaaatattttttttatatgtgatacatatagaataattcattcaataatttatacagtattaaaaatacaattttctttgaataatgatattttatttaatttaaaaattaatttctaatattctttttattattattttgattttaagattttctttccatcttggttttctatgatccgttcaaaacatagagttaattttgggatgttcaaaaaccaaaacccaaagcaaattgaaatggcatgtgaggggaagcatagtagcatggtgccaagtttcaagatttgcataagatttttccctttcacacaaataggatagtttggtgaacagacatgacatcagaggaagcctagatttggtgctcagctcgtctgttggattgaggttgactctctctcccctctctcttcactttacctttcttccttactcattacaattttccatttttttttctttctttctttctaccagccatccataaacaccatacatacctattcatttcacatttgctttccctttactgtttctctctctccctctctctctctctctctctctctctctctctctctctctctgtctctgctttccttcattgcaaaccaagcttcctttccagcttggtctggtcctgccctcagacacaacacaatacccaccaaccatttttaccacatttactctttctcttctctaattagtaaaatacaaccattctctctctacctctttattttcccatcaaaataagatttttgtctggcattcccttccattttcttatattaatattttttacattttatttttttgtttaagtgtggcccacttgttacctactgttgtgccactacatcttttgcagcatctggattttgctgtagggtatgtgtgttgctcatcctcaggtattctttgcacattaagtctcttgtcggttccaaatgaggtgtgaaacctgttgcttctttgggtagaggattcagaagtctagctaccttggatcaccacaaaggtaaatgctttgtctttctcaatcactttttggataatatacatttcactttctcttttgtttgcttggatcataagtgatgctttcctggtttcctttctttttttcattagaaattgttgtgcttatcaacatgcatcaggttattttactttcccaaatgaactgtgaattcattcatcatgcctttttgattgtgttggttttgaaactgctgaattatatatgctgcttcttttattaattggattatgttttattgtatgccattgccaataaagcctgagatgggagtctttcatcttctaatttagcttacaggaaattttgtagtctgagattaccttaaatcatgattaagatgcaattagtgatttgttaaactcttgctttggttgttgtttatggcattgttgcaagaactgaaatgttggctgtaaattagtatgttcagatgtgtgtttcgaagtcttgagtaaggggagtacttaacttgaatcctgtacttgagtgggaatgtcttggttctaccagctgaagaacttgtggggacgatattgattgactcggtgcaaccaattatgtcatccaacagttctttgaatatggaattgtcaaagaagacgtcatttttgggtttgaaacgatgggttttgattgggataggtgtcggtgcatttatagtgctgattttgtgtatattatcgatatgggcaatgtttcggagaaagtctaggagatctctggacaagtattctgtatcccaaataccaaatttctcaaaagatatcgatgttgacaaggttggggtgcagagttctcatgttcaaccagaaaatgtggttattcctgttcatgacaaggcaagtgacaacaattcagataatgtatcagttcgtttgggaaatagcaaatctggtgatcctgataatatcagtcagtgcagctcaatttatcatcatgagagaggattgagttcaatgtcagccgaagaaggaagctctgggaatgttaagaagcaatctacgttgtcacatggagggctggtcactgcctctcctttagttggcttgccagaattttctcatcttgggtggggccactggtttacacttagagatctggaaatggcaaccaatcgtttctcaagtgagaacatcattggcgagggtggatatgggattgtttacaggggcagactgattaatggaactgaggtggcagtgaagaagcttcttaacaacctgtaaggatatttatttattattggtgtaccctttaattttttttcttctgccactttctgacactacacataaacaattacttctttttaatcctgttatgtaattgagttctgcattgaattcctaggggccaagctgagaaagaattcagggttgaagtggaggctataggccatgttagacataagcatcttgtacgccttcttggatattgtgtagaaggagttcataggtaaaaaaaaaaaaaaaaatctttgttttcctacattagtatccactacactttgtattatatttcacaaattcattctcaataatagtgccagctttgggtttatgatagtcatattctacttagtccaaaataggacataagcttttctctatgttatgtctctttatctgtcataatgaatgtgcttcctgattgatattcaggctgcttgtgtatgaatatgtgaacaatggtaacttagaacaatggttacatggagacatgcaccaatatgggacacttacctgggaggcccgcatgaaagttatacttggcactgccaaagcgtaagttcagggtgcaacttaaaatatataccatggtaatcatttgtatagtctggtgccaaatcactcggtataattatcataaatctctcatctctgaattttgattgtaaaaatgtgttcctttaattaatgttattactattagtgttttgtgcgtgtcaaaatatatcataaatgttattaaatgtatttatgtttcttgataatattttgttatagactttatattctcatatagtttgcagtatatttaagcccattaggtttctagtctaaacaacaatatgcactctgcccatgggaccactgactatcttaggccatatttggatttaaattactaacaatgggtggaatgtgatggaatgaaataaatttaccgttgcattgttttaatattttatgatggaatggaattgaattagaaaaactggttacacccagtacccccaaattggggggaagaaaaggagcagttttgggtggaatggaatggattccatttcatttcactccattagttcaaacaacttagtgaacatttgacctattgtagtttaaatattttacttcttaattagttacaaaattatttttatggaagattcgatgatggaccttgttctcccgattaaccctctattgtactgtgactggtggcaggcttgcttatttacatgaagcaatagaaccaaaagttattcaccgggatataaagtctagcaacatattgattgatgatgaattcaatgcaaaggtttctgattttggtttggccaaacttttggattcaggcgaaagtcacataaccactagagtaatgggaacgtttgggtatacagaaaatttattatctctttccttattttttacttaaaggatttgtacacttaggaactcacttttgttttggatttcagttatgtggcgccagaatatgctaacagtggtttgttaaatgagaagagtgacatttacagctttggtgtcctcttgctggaagcagctactggaagggaccctgtagactatgcgcgtcctgctaatgaggtggctaatttttatgaactctgtctgcttgccagttctaaccatgctttccaccgtaagtgatcactgcccttcaaatagctgatgagatattgtttatcttcattatgacaggttaatctagttgaatggctcaaaacgatggtggggacacggagagctgaagaagtagtggactcaagccttgaagttaaaccaccactgcgtgctttgaagcgcactcttttggttgcacttaggtgcatagatcctgatgctgaaaagaggcccaaaatgagtcaagttgtgaggatgcttgaagctgacgaatatccacttcgagaggttcccttcaatatcttgtcttctcatacataagttctactgattagttaataactttgatcttgagtcttatatcacaattttgcatattttctaccttgtgtgcattcttatcattattctccttcgtacatgtattggctaacctaccaggctaccaccaactagaaagaacaaaatattggatgaactcaggaaaaaaattgggggtaaaatatgtttctgtttcctacaaataataattgttggttttagtcctcataatatggcatataggtcacattaatgaacattctaagatggcatgtgacatgacatatttagatgcatgttaagtcatcaataaatcaataaatggtgatagagactattttcaaaacttttaacataaaaactaaaactaatattttttttttcaagaactacaaccaaaagtcgccatattaaacccaaaaatttgatattcttcaggctacacaatttctatttacttaattagcacctcagtatagctcaaaaacaaacaaacaaacaaagcataatgttttgtgtttatcataacatattagtgggagtatgctgtttaattctacctacttagcattctgatgcattatattataaagagcatggtcctcttttgtatgcatgtttttgggtgcttatatactaaatattgaagtattatatgttgacaacaaaacactaaaacgtaaggtagacaactgattgataataatcactttcaggatagaaggaaaagaaagagtggcactgccagcatggaaattgaaaccgtgaaggatatttctggtccatctgatgctgaaaagatggaaatttctgaaagccacgttgaaggataggattgacaaccccatgacttagcctgcatgtacaattcccgttatacacgttatatatagtaacttatctataccatattgaaatatctccaactttgtgaccttattaagaaaattttgtttcatctgaggatagaatcagatcagagtgagcccgtttggataatgaaggttttgttttgttttgtttttgtttttaattgaatggttgccattgaagatatgatacactagctagccttgcaaagagggtagaatcagtatgggtgctgtgagtgttagtgttttacagatgctacggggcctatcttcttacatgattgttgattttctttcttaacttccttgactttatcatatcctcacatagtcactcgctgctggagagtggcgatagtaaaaacgaatacttggcttcgatttccatgtcaagtgacaatatatttttcaagcatcttaaatgggagttccttatgagattcttagacttaagaatcagtttttatacaatttcaccattagagtcaataattgtgattttgtatatggataattcatctatatcttgttcgttctaacaatattttccttttgaaagggtaaataaaagttgtttttttatagagatatttttagtgttttactaatctattttaaggtatttaacatattgatacctaatgatttttagcaaagtggtgaaaatgtagaactcatgtaagaattttgtattttaaaaaaaaaatgtaacattaaaagaataatttcttgtgtgacttattaaaataatataaacatatgaaataacttgtgagatttgttttaagtttttaaagttttagtgtgtttgtatatctgttaagttcaacataatgccaatccaaggcctaattgtgtaaaaggtctgttggacagcagtgtaaatgtgtaacaactttccaaacacagccttgcacattgaaaattttaaaacttatgtggtaatagggctgatataaattaagaagttaaatagcttgtggagatgttcttatgcagtattttggcttatttgtgttattttctcaacaattagattccttatcattactactgctgcttctctccccctccaaattattgggcttttacggttagatatagctaaggtttgtctctacagtcacttatgtgcttattatacgtgtagaagcaatgtccccatggttcaaattccaacttgcacaaattatctgacaagaaatgggcattaatttttttttcatttctaacagtatagttaattaagttttcgtttcaagatggccagcaccgaatgatgcagtaccccagtaatttgtaaaagtggttgctttccttcacagcacataagcacattgttggttcatgcactaaaattgtgaatggctaatctagttatgattatcttttgattctttttaacataatttttgttccattccattgatgctagtgtcataaaggaatcttatctttcacaaataaattaaattgtaccaaaaattttgtggatcttagtgaaataatgagaagggaaaaacttttaaatttgcatttgttatttcaatcctttgttgattctcttatttcacccaaacgaaaagagaatctaaacatgggagtttcttgaggaagcacttatttggcagacaggcaaacaaatgattcaagttgaaggcttcaaacggtggaagtggaatacataattattcaatattctgataaagtagacctattttcacggactagcatctaggcttcttgataactatctttctcttctgctacgtaccactttacaagctccatggggaatgcggcaagttggcccatatttgccacagcttttgacttctccttccttcctttcataaacgtgttatttactgcatgtatttaaattaatgactttttgactataaagggtaaaaaatatcagtaattaccatagttttaaaattatttaccatttggggtaagttgtgtcaggtggtacgacttttaaatcagaaatcgtaccacctgtcccgacatttatatttttcattttttaaaagtgaagtcgtaactttatttacgattttactgtgtgtatttttttttttacgtttaaaagttgtaactgtgtttacgaatttaaaatcgtaaatatatttaggactttcaaactacaatttttttactatttagtttactctcaatagtcgtaaatatatatacgcgactttaaagtcgtatatatatttacgactttaaagtcgtactgtttttattttttgctttttgaaccccaaacgacttttaagtcgtcatattgctcacgactttaaagtcgcctacattaaatattactaaatacattccctccactgttttttataagttttttactaaaaaataaaatttgctaattgcaccccaagtatattccaatcttttcttttaaatcttaaatattaaatgataatatttttaaaatatatcccaaatagttacgatgatagtgttaaaaaaagtataaataattacatttgtaaaaaatcattaacaaaatcaacatatttaattagaaaaatcaaaataaatatatgttatttcatattttacaagttaaaattattatcaaaatattttcatccaacaataaatctctaaaaatttaaattttaacattactacaaaaatttacaaaattaattaaaatattaaatgtgatccaaagtaattataacataaattactaaaatacttaataaaataacttaaaatatttacaaaatattaaatagttttacaaaaaataaaattactttcatttttaaacaataaaattaaactactttttatctatttttaaaattaattaaaaaaaactcaagaccaataaaaaacttcacaatgaaacaaatgaaaataataaataaaagcaattataaaatatttaatatatatccatatatttaatataaaattaaaaaaaaacaaaaataaacatatatatatatatatatatacttaaggaaaaataatatatatatatagctataaaaaagaaaaagaaaatagttaaactagaacaacttttgaatgtaaagaaaaaaaaaatataaaaatataaaaaattcagtttaaaagtcataaatatatttacgacttttgaacgtaaaaaaaaattatgcacaatgaagtcgtaagtaaagttacgacttcactttaaaaaaatgaaaaatattaaagtcttaacaggtggtacgacttttgatttagaagtcgtactttctggcacgacttactctcaaatggtaaataattttaaaactattctcatatagtaattactgatttttttttacccttttatggtcaaaaagcctaaattaatactacttatatgttaacataggctttataaattacatacatttactacttatatacaagcaatgttaagtatgtttggaaacatggtagctaggaacaaaagaaaaaaacgcatctattttttttaagacatggaagctatcagctactatttattaacttcagagataatatagaaatctacgaataattaagctgcatgtaagcaacacatgctaattaattgtacatacaattttcattagtaagactctgtctagtacatgtgaaatatttaagaaaagaagtgaaggggatagaaatgcaaagaagtgtacgatgtaacaccccgtgtgcacccggtgtattaacattcataatatcagaatcgcgcttaaaacgttatttgaaaactatacgaaagcgattgaatcgtatttcttgattacattatgtatgggatgtataacacagcacacacacactcatcagatagtatatcaatacagtacatgcccctgctggtccagtttatcactcatcatcataggcagataaccaaaccatttcacagatatatactcaggaggaaaaacatttatattacataaccaagttctatacaaatatatacatcaatttccacaccatacatgtggtgatacaaaagaatgtcctccctcacacgagggtatataaacatatacaatatatcagatgggcaaacacgccctacagccctctacagggtactaacaagcatccaatcacatccaatcaaaatgagctatctagctctctttctgctatctctatccatgcatgcaatgtctctgctagggcctcctgccctgagactgctctcctctgtcagaagagtcacctgaaaacatataagccccacacggggtgagatacacatctcagtaagctcaaggtccggggaggtatctcctccaccctggcccactctccatgacacaaacatcaagcggtcacaatcaaattggtcaccctgcccggcctcccggccctcataacaatatgagaaagtcatcttgctctatgtatggcggataaacatcaacgcctaacctcagtgtgagaccggatctcacacccgtgccatcccattgggagctaccccttatgcatggacgcacgtatatggtacctccgagaatagaaggatgttcttgacccgtctcctatctcatctgagaatagaaggatgtccttgaacccgtctcctatccccttcgtcttgagggatcatcgatcccctgggatatcatcaaccaagagcaaaccaactaggaggaatagccgtctcctagggaggtccatatccatcttactggccagaagatctaataacaggcatcatacatttttcaagcatagatgcacatgcatatcattatgaggatgcaacaaccaaatgcatgcatcatgaatgtaaccatcactcctcccggagtgtggtggggcacaaacaagcgagaaatcatctccagggaccaagaacttacctggcaaagccgagctctgcagttctctccctgattcgtggcacccgccactgacaccctcggtgtcaagccctaatccaggcacatatacacatatcaacatcaattcaagcaatccagcaaacataacataatcaaaagtcctctaacttagggttcatcatagcccagcacacactaggctctcacagacccttctaggtccagcacagcttaatacaacgctttagggtcatcacagattccacacaagccacaaaccatcagctcaaagctctcatcggctcaatcaaagtacctgagtccacacagactctatacagttcacatatcatgagctcacagctccatcaaggcttagagtcactctccagactcaatgtaagccaacatagagagctctaaactctgtgcagttcaatatctcagaatttaaatatagctggaatggtctatgccttactcaaggcaacgttcatgtagcctctcaggcatctcacagtcacattctaaggctcttgcatgtcatataaccatcagctagtgactcagcacaagtcactcattcataagcagagccaagaatcaaagttcaccaaatccaattctgaaagctaatccttcatcactacacaattctaagcaagtttctctacaggaccctggactaattctagccccaactcagatggatcactattcataggacacccccaaatcaaaatttaaccggagaaacttgagattcttacctcagaattggcaaggaagacttctgaactacttctcctagccccaatgttcttgaatctccgtagttccttgcctagctcaagttccacaattcctctaaaaaaggaatctctcagctcaaggtttcaaggggtttggatgaatgattttagctttctaggtgttcctcacaagttcaatggctaatggaagtgatttgggctagcaaacaaggttctaggaagcttaggcactcaaaaatggtggagggagctctgaggaagaagagaaacagtgtttctctccagaaatcgcgagctttctatttataatggtcagcaccgacttgccacgctcctggcgccactttggcgctgatggcgccaaaatccagcatctgtggcgctcctggcgccaacttccagcacctgtagcgctcctggcgccaaactccgtcgctaaatccgtcactaaggcttttgcgaccgaattttataaatttaaatttttatttctttttgcaaaaagggttattatatacgacttccctcgattggtacacgtgaaatatacgagaaatatttaaaaaaaaaactattggtggagtccatagtcattaacttccactcactacatagaagttttaagtgaaaaacttgaggcaactattaataggtatgaacaaaatgaagatcatatataaaatgcaaaaaagttaaactacaatcctaactaccataactatttttaaaatattgtctttttaaggtaataaaattcaaattatattattaaaaaatagaaacaggccacgtgtaagacaattgggtatgttgaagtttcagttttcccttaattcgaattcagaatatcaattaaaaagttttaagtttgttaacaatttgttacaaacaaaaacattaatcagaaagtgtaccgaattctttatggtccaaatcaacgacagactcatttacggggtgaagtccaaatattgcaatatctcacaatctttttatgagaaaaaaacatttctttgtattggaaaacacaaaacgctacttttttgccttaactttgacaacaagctctttggtagactatggagtatggaagaggcacattgcagaggcaatttgaaatttgaaattgtaaggacatatccaatagtgattcttagaaggaaatattaacttcaagatctgatctttttaaaattcattattggagttggcaatcagatctctggaaatctggttcttccacaagaatcaccaagatccgcactgtttcctaaaaaaaaaaaaaaaattgtcactttgcccagcagaaacccacgggaatcaattaccacgtcgaaggaaagggaagaaaagagatgaacaatagaaccagtacaaatgaaataaaaaattagaaaaaaaaaaaaaagacaaatctaattttatgagcaccatatctgtctctacatgttgttgatgagaataaagatggtggtagcgaagggaagggaggagagtgtgggagggtagtgtcggagggaggagagggtgagggtttgttgtgtagcggagggtaggggtggggttcgcgacgaggggaggtgaaggtgggggtttggggcggagggagcagatggtggcagtgggattcgtggagggagggtggggtggggaaggtgagagaaaacagaagggaaaagggtgaacggtggggaagcgtgagagaaaacataagcagaagggtgaatagtgtggggggcaccgttgagaaggaaaatgggaagaacgacgaggtttgacattcaattttttttttaaagggtaaatagtcatttttatctttaaaagtgtagagtgttgataaatttatttttaaaagacgaaaatttgttgttatgatatttctattgtgattatattaggcataggcagtgacaaaatcaaattgaatctcatttttttataatgattaacttaataattatgtaattttatttgattattatattttaggtaagataatgttacattagaaattttagaataatagataaattatgtttattaattaatattatatttattattatgtttattctaacttatgtttattttcctatttttttaaatacttattataatgttctgtttgtaacaattaaaaaaggataaaagataaaaattaaattatattttgattaaatagtcattttcatcccctgaatgtgtaaaacacagaaaaattcatccttaaatgcatcactaagatctttcattaattataacgagcataagttaacataagaataaatttgtcatattttttcacttttatatactaaaatttgaattttcatctttcggatacgaatttgtcaacattctacgcaatgacgaaaataactatttacccttttttaaaatattagaaagtagatatcttgtgtgacttgaaaaaaagtaatgaaacaccatcacaacaaaaaatgtttgatattgttcctttaaattttttattttttaaaaattaatatatcagactaaattgaatatttatcctaaaaaagtaagaaagtttaatcttttctataaagtatgaaaaaacttttttacttaactcaaaataaaaaatttaccttaattattagcttaaagtttgaattactcggaagaaattacgttttattattataataatttaaaattaaaatattatcctcttaattactatattctgacttaactaatttaattaaatttttatttaactaataaaattttaaatttctctagagtaattagttttcatttaattagattagatgtcataaattaaatttcaattaaaaaaagtagttaaaaaaaaagtccgtgcattgcactgataataaaactatcttcgtttacaaaaactgaccctacagtcctcatgtcttcttcttcttcctcttttactctagctttccatctcgtgttgttggtgtcttcttcttcctcacaagctccagtgttcgatctccaacataatcactcgtgtattcaacataacgtttatgttggccaacaataaaaaaaaaaataatacattttctttgtgtaagtgtaaaatgacatattttagaaagatttaaatatgtttttgatttaagtaagttattattttttaattttggtatttagaagtttttattttatttttaattcttagaagtttatgctttttttttataatttcagtccatttaagatttcaaaattttaatttccataagtttgcgcttacatagattaagattaaaatatatatatatatataaactaaaaataaataatatattttacaaggaatcaaaattaaaaaaaattaaaatttacaataattaaaaatgaacaatttttttacaaagactaaatttgacaaaaaaatatttaaatatttaaaaattattaaatttcttttcttttcctactttcatacctaacaactttatcttatttttactcaatttcccttctatttttctcaaataaaataactataattttgttatactctatttcttatatatttctcttttcttttattatttacttgtttatactccctctatttcctttctctctatcaaacataaccgtttttcacataattttatatatttattacaagcatactactgagtatttggacttctaaaatagagtagtataaatctatgctagtttccatattaacgagtataattatttcaaatgttgtttgaagagtatgtaacatgatcacaacaaaaaattgttcgtgtgatcatgtccagtatcaacatttgggtgtatacaatcactctataagtctttcctttccctcacttctcattaagcaaattaattttctatacattagcttataaccagatgtttcttataaattagcttggttggaccctagttctaacatggaattaaaaaatgtaaatccacattctgctactcttacttttgctttaacaagttggaaatattcaagtcacgttgattatgcaattggaatgtgatggaaaattgccgttttaaggcattgctttgaggttggaacttgcaagtcagacaaaacaagtctatttcaataagcaatagccacaagcatgtcactttttcaaccacggaatcgattcaaatatcaaaagtagagggactttgctagattgtcgttgctgcttcaatatttctctagttctcctactcttttgccagatagatgcaacacttcttctgtctgcatgtctaattccacgtcaactgatattttgataaatttttttcaaggctaatgttatataccataacaaatatttttaatactttataaatgaaagtattaaataaaaaataactctatatatttaatgtttaaaaatattactattcactaatattatttcgttggtatgatgaaattagacttagattcttagttaaccaagatattgagtttaaatttttttaatgtgaaaaatataattgagatatgagactttattagagttgatcggttaaattttttaataaaaaataattattactaaaattcttagacacttaacatttatgacatgataaagaaatctaatgtacaaataactaaaaggatttagtaggaaaataatataatttactcgagggattaaaattttatttttataatgaattaattttaaaattttcacaatcatttataaattttaaaaaactttaactgcattgtaagtttatttggatttttttaacatgttttttattcataaaaagattaaaaataaaatcttacatgggatactacttcaataatgaaattatttctacaaaataggataatttttactgtcccacattaatgaaacacttcccttattgtataaagatataccttgcatgtcactcaaacttttattgggcaacaactttgtttgtatccgtatgtgactatgtgtagacaaatgaaaagccggtgttgtaaacaagttggacaaggacaactggttaaaaggggttaattttacaaaccaattataaaagtatatctcttttgaaatattttatcaaattgtggtagaaaacactggaaaactctaataaagtgtcaaataatatttaaaagaaatattgatttatcaatgctatgtacttatgtagtgtccatgtgagacactacaataccagtatcattgttactattatcgcagtatcttatgtaatgttaataaatcggaaaagtatatgtgacattgtttaattaaaatagagtttttttagtattgattgtctcaatttggtgaaatatttcaaattatttaatactttatttgtaaattaaccctggttaatccgccttcatttttcaatagctaggtatcttcaaagtgaactacaatctcaagttagtctctatttgttaataaattaaaaagagtccctcaaaataacttttgtcttcctcattcgtcttttattataaataggtccctgaatacagtatcgttaaaatgcaatttattccttacgtataagtattaaataaaattgtattttaatgataacatatatcttaaatgtgtgagggagaaaaaatgtgaaagctataaagtagttttagggacttcttaatttcacgtaaaataataataaatgaatatatttttggatatgtatgtgttaaaaaattttaaaaaatattgtgtataatattctatttaactcgaacaaaattaatttattttaataaaagatacatataatctatactaaaaaaataaatgaagatatattagaataaataattgatcttgattttttaaagtagcaaatattttgatgttgagatagtaatgttgtgttgactaatcgttgataaatttaggataaactaaaagcacacgagactgagaaactgttaaggattcaaattttgtcgcgagaaaggtgaagcttattaaaaagcttctatggcggcagagcaaacgataaatcaataatggaggcactcaatgattcattcatggaattaattaagacggtttggatatggtacaaagtttgttaattagttccgttaattatggtaaaccgaatttttagccataatgatttggacttctgcgatctacaaaagttgtgtgggaaaaaaataaatcagttttttcactttttatttgtctcgtgatcatttagaatttttttcctcattttttcaaagttgtcaattatcgaaatgaaattaacagtaaattatatcatttttttttatatttttaatgtttatatattaaaatgttttaaaccttggagcagccctcagctatagtcagccccgttagctccacctgctttgactttgtatgccatataacacccccccgtgtgtcaaatttcaaatcaacattctattgtattttaagttttttttttaatgttcagtactttaagatattacttattagtaaagaaattaatgtattttttaattaaaatacaatagaaattaataagttctcatgtatattaaatatatggataaaaaagggaactttgaaaattataatgtaaagctttgtacaatatagaaaaaaatactatatggttacactaaaagattgctttttgagattactattttaaattttacaataatataattatacgtaactaattaagaaatgatatatactattaaaaataaattccatatataaaaattacccataactttattgaagcgttgtaagcatcatcaagactttattgtcttgtcttttgaatacaaatttgtaatgacaaaaaatgtccttttaatttagggtgcatttttagaatacatgtacacaaataagataaaaataattatagataataatagatctaatattaaatttttttatgttcaaataataacaaattagtacaacatcgcagaaaaataatcaacaccgtaactcatctcaaaaagataagagcgagacaacttgctaggcaaatataattatgaaaggactgaaattttaagcaacttgctttttcctttttaagtatgatttgatctacggaaaacatgcatttaagattttaggggcccggtgtttgaatagttacacacaaaaaaaaaaaaaaaattgcgtatttaatttttaagtagaaaataaataaataaaatatgcccattatagtcatatactagtatacatttataagttagaaccagtgaatgattttatggatgcattatttttttcttataaaattctgaacttggatagctgtatggctagttggattatcattaattcatcgtaatcaattaaacaggatacaattaattgtgaaagtaattggtaaacgtcaaataattgttcaataatgaacatggaaaagttaagggtaactaaacctcattttatagtgtatgagatcagatgaaaagaagggaagagaagaaagagactgagaaacaatatgatgaaaaaggaataaagaaatagataaaaaatgaagtagaaaaaagaaagttattttgcaaatgtcacagcaatatttattctagtccaatatatacataatttcagctaatatatttcaatcacaaattcgagtttgtatctaaacatgacaacgggctaaacgaggatggacaggcagggccttaatcttcaatcttgactcttcaacatatcttaatttatacgggttgaaatttattatttcattacttaataaaattatattaaaaatctgattttagaaaaaaataaattaattgttacacatttatttttaactatttttatcaataaatttattgtaatacatttgtctacaaaaatcgtcaacaaaaaaatattatattatataaaaattctaaaataaaattaacaagtaataaataaaattaagattaatacatttatcttccttgattctattgttttttaaggtaaacaaaatacaccaaatattaaataacataactcaaagttatagacactaacccaatattcattagttcaaattacaccaaattataaataattagaaaatgaaaacaatcttcatcatcaaaataaccaccaacttcaccaaagatgccatcaacatttctttctggaccgatatttataaaatcaaacatcatatatttagattttctttcaaatcttaaaatcgaacatcacattagtaaataagtatagttattactttactaatcaacaataatatctattgatcttgcaaatgttgaggaatgctactgaccaaagatccacctatattttaaatttttttaaaatttaaactacaaatagtaaataacaatttataagttttaaaaagataaatgacctgtgtgttgtaacttggaatctaaatgagtgaaagaaaaattgaaaatcctaaactaaagtaataaaagagaattttaataatttcatcatctatgactaggggcgggataatgacattccatccccgaccccgaccccgaccccaattagaaaagccaaataatctccaaacccaaagtcatacccaatcaactcaaatatttcttatcaaagtcaaaataagttcaagcatatacccacaaatacggatttcattctcatgcctacttgtatcgaattcataggttggtcgtatatactcgtattagtataaagctcgcgaatcaatgataaaaaaaatttaaagctcgtgaatcaagttttttttaaacaggaaaattaatccaatagtattagttttggaattctaaaatgataatgctcctgaatattgaaagtttagagcatcaattttgcaacaatgacaaaacaaacaaatcgagaaacgagattcgagaagatgcctgcaacatattgttcttaatcaagaagaaaaattgtctcactttcttgcttttttttttcgttgtatatatttttcttggtttatttgcgcttattttttaattattgtcttcgtattactttaattatcatatatatggctggcatggagagaagaggtacataccatttcgccatgttgataaagaaagagggttttaattagaatgtcatatttacacaataataagaatttgtatacttatctcaactctttttaaaaagtatattaaaaaaaaaaaaagccttaacatagagagtgttaatatagcctattaactgtgctagtttaggtttaagtttaagtaaaatttcgaaaaaattgtccttttcagtgaatcatctgactaaattcaaataagttaaagtgaattatgaatactgaaagtctaaatcaaatagaaaagacagtcttagtatgtataacctcgaaagtacacatgcacacaagttaaaactacactacaacataaatacagagaaaattaatattttaaaaaggagccaaaaaaattataatttatctaattattatgatattatgatctatattggtataatattttttttaaaaaggaaaaaaatatgtaaattacaatttcaaagtgttcatttatgaatatggcacggcatggatattattttaaattgtctaaatttcttaagtataataaagaattttcatgatatgtttggatttttaaaatatatgaataacaattatggatgtactaaagggtaaaacgaacagaataaaattactttcctttgaaagactaataaggcaattaacaaaaggaaactcatttgaaacagaattattgtacttattaattaatctattaaaaaaaattcagttcccactttcaccctagttttaagggcgaattaaaataggttatttgaaggaaagaatggagaaataaaacctccaattccttttctttcattcttttctatttttaaatcatctggggatctaataataagcaaaagaatgatatgataccattgcttcttcttttttaaaataatcaaataaaagagaccttgaattaatttctaaaaatttgtttattataattcttaaagcaaaatagatcattaattttaaataacttcatttcgaactagtagaccctgatatacaaatggtttagttggtaaagatttattgctaattaatttcagcttgcatttgaatcatctggagctatattgattcctccatttggtttcacgacaaaacagaaaaaagaagataataaataataaaacggtagcttaagatcatatcaatcttaaaagttaggtatttatccacaaccaaaagtatagttacacacgcaagcacatacactataactgaaacgtcgaaatatatatatacacggtcttaattccacgtacctatatagttcttcattaatccccccataatttgaaatatatataaaaactgtaaaatgattgacatatatatcaaattatcaatgcaaaaaaataaggaccataaataggaattaatcaatagctacgttaccatcgtgttatattgaaaacttctatttctagtagcgtactccttgaccactcttttaactgtgttagctagtgatccaagaaaccttcactaagtagtcctatcaatatatgtacctttcactgagaaagatcaatcatatatggtacgttaatcgtcttgtcaaaaccatctttctccactacatattcgcaacttgcaaagtactcaaatgcaaaacacaccgcccatctctgacatttttgacaaaatttaccaaactatatttaagaatattaatcaagatcagtttcatctgcagtaattctaaatactcatttaatgctcttagatccccggccattaccatatagagacctgtctttcatttccatacaaatctaggtacatatatatatgacttaaagagagaaggagctaattaaccaaggggaagctactgcttaattactacacatacttatatatagacaatgtgaaaatacactgcaagctccaccatatgctaatagaaatgggttaagtgcatgtttaattctgtttatcttgaaaagataattattttaaaaaaaatcctagaaatatatactactaaaaattaataaatcagtgatcaaatttagtgatagaaaattacttttccttcaccagttaatttcgggatcactaaattttagtaacggatttcttttaaaacatatatagatcattccgttactaattttaatttttctaatagtaacataaaatataaaaccattatttttcctagataaaataaatcaaaacatgcactaggtttttggtaagttcatggctcttgtttgccagggaatgatggtagtaggtcttgcaataaaccatagtcacgagggagttggaactgctgctgctgttgaggctggggatggagattatgggaaaggttttggtgaaacattggattttggtgatcattttggctataacttggaagcaactgagcaagaaaatcttggggtaagcttgacgccatataagaggaaccaaaaaaggaaggtgatgacaacatgcttgcagcactgccccttagtgttgctggacagtgatggttgtgttgcccttcatatgttgtgatcacgattgttgggtcctggaatgatctctccacccttttctttacaccgcacttctgactcgtgcatctataatagctcctgcattataaataaagaatcaatgttacattcttacgtgaaatgtgcaattaattgatgagaagtatataatttcttgatgaattaataatttcttggtattgttgaatatatacacgtaagtgtaatattatggtcatatttacaatatatatgtggtatgtctccaatttcatcattagatagtgaataacaaaaacaagcctcaataagtacttacaaataagctgttacacaaccttagtatgacaagaatatgaatcattacatcgatatggcaacaaataaataaataaatagaagactttgtgtgtcaatatgtgatgattttggcacaccccaatattccacaacccttcttaatcatttttttcggctgatacaaatacaagagccctcatcatttttgccttaaaaagttaatattaatgtacaagaactagattagaaatttcgaaattggaaaaaataattaaccttgggtatggactattcttgaccgctttctgtccatattttctccatctgtatccatcttcaaggtgatcgatctcacttttagtcaagaaggcaaagcgaggctctcttggctttttctctttctttttgggtttgttcctgaaacgctccaaaacatcagtcaaattcaccgcaagatggcagataatactcaccaaaccgataacaattattttagggttaagtgcctataattgttccacactctccaccattttagtcatacacacaaaaacctacacacactggatatagtataagagagtagagacaagattgacaaaattcatttcataagagacactgaaagtcataaacaactgaaaagacacgaaatgatatatgggcatactataattgcattagtaaatactactaaatagtacattcaaagaagaaaattcaaaattctacataccctctagaaaataacagttaataattaataagataatcagatcctattcatgaattgttaaaagaagaaaaagagaaagtctatgaggaaattaaaatcttcttaccctccattgatctataagaaatcacaaagaaagagggcaaaagaagaagaatttttaatttaaacctactctttcttaggcttttcatctccttcttcacacccttttggctgcttatctttctggttcttggttgagtcttcttctatgattgcttcagcttcattggatgatgaagacacagatgaattaggtgttgattgttggttcccactgacccccacagactctcctcctgcactaggcttcttggggttttcatcaatattggaggatatcacttcagaagatgaacaaggcatgtcaaaggctcttgagagggtgttgtaatccatggaaccatgtaagcagtcagtgaaagtggtgtgatgatgagaagaagggttattatgatcatcaaacccttgaaagtttaattgtgagccaattggtgctgagttgttgttgttgtccctaaagaatggaaagcttgatgatgagtggttgagttgctgatcatggtggtggttgtaatgaaagggatcataaaaacggtccttctcattctccatggaagagagaaactgaagagatgggagaatgggagaaggagaaggttggaggaggaagggccagatcaaaaaataaaggtagctttgagaatgatatttcagctaagacttaaattcgatgtggttgcttgttatgggaaagtgagcttttggtttagaactttgtttttcttcttgcttttattcccttctacttttgcacctcactttagtgtttggagctaattggggagtgtttctctatcttaatctttctaaagtcagtgtgtggttcattttttttctaaagcaaatcaatttttcttctttcaaaataaataaaggaacaattgtttatatcacttgtttctcgatttaatagtaatacaccgtatattctcaaacaacatctaatcatattttacatatatcacttgtttacacacactttaatttgtgttgaaaaaaatatcttgtataattttttttgtcttatgagaacgttaaagttgtcgtcgcatgactttaagcttaagagttcaaatcttaaaaatagtaagttgcattatttttttttctgttcatatattatgcaatttgacatattttaaagggtgtaaaaaagtatataaaataattaacatgaggcaaatattttaatcctcaaaaggcaatcgattcgagaattattagtcagttggttgaaagatttattacctatatagttgatagcgacttctcaattaattgaagcactcctttattaatttatttgatcgttttgaatctaatcaaaagagaaagaaaaataacaagttgaataatgcttgcatgctaagatgtttctctttttatataataaaagataattgatgttatataagaaggcaacaatgctatgtattttattagaaggtttttggcttgctttgtaatgtttaagaagagaaaaataataaaaacctcaacctcaaatttacattttgtgttcatttgagctccacgtatatggtttggtttggtaggatcttatatgatagcgtgattgattatccggggtccttgcattcgtatgttgacaaggcacaataccttctagctagtatatattattacatttctaaatacaaataattaatatgtattattacataaacaaatgaatataaataatttgtattcatgtacattatcattactatcattgttggagatagtttttgacagagaagggaagtggcatgggggggtcgtagtcacgttgttaacaagggagtggagttagtcaagaattccgactataagcattttgtttttgtaattttggaggtttattcttacacgtgtcatgcgattgggcaccggcatttgaccggagagtgacacgtacgagagattcgttcgctgctattgttgattgttcagctccaacgcaaattcttcggtatttaaaaagtagtaagaaaaaacaatacttctatattatatattaattaaatacatgaatccatttagatataataatattaaaactatagtataaaataaaataaaaaacataatgtataaataatagtataaatttaataatgcggatttttattctttctataacaacaagaaggaaaaaaaaaaacttatgctgttcctcatcacgcctagctatgtctatgactatggctatatattgtgttgctgagtgggttttcacgtcacattccttttttccctttctttctgcccgaagtttgtgttgggtaatctcggaccctcaaatatcaaattgcggaagcggaataaaatcaaaaaggggagcgagagagacaatcaaatagctttacgtgggagaaaaccttcttcaacacgaagaggaaaacccacgggaccaagtccagatcaaatattcactataacaataatggattacaatgaatcaaatacaccaatgtggtggtacactcaacctctccaacaatggtggtcactcaaactccctagagtgtttcactcaaactctctctagagatctctcaaatgcatagcacaaggcttgctcaaatactgcggaatctctcacgcagtcaaatatcaaatagcggagtatctcaacgctctctcaaatatgcaagcatggaggcttgctcaaatgtgctctcaagattgtcacttgaggctctcaaatttctgtgtattttgccttcacccttgctcatctatttatagggtgaaatgggctgggtttaagccatcaaatcaaataagattatatcttatcaattaaaagatatctattatatcttatcaaataaatatcttctcaaataaatatcttatcaaataaaaataagattatcaatcaactaaaaacggaaattatccaacaaatctcccccttccgtttttcagtgagacctgggtcttcaacttcaacaacccggccttctttctcggcttcaatgtgccgaattcatcagcccggcttcttcacagcaatcttcaaattttcatgctggtaccggcttggtcaacatatcggaccagttcaaatcggtgtgcactttgctaagtattctgcaacgtactcggcctcggtcgtccatagtgtcacacacttctgcaatcttgattgccaagagactgctcctccaacaaatctcatcaaatatcccgtcgtcgattttctcgagtcggaatctccccctaagtcggcatccgagtagccttgcatctcggccaactcataagtctggttttcatgcagggaattcatcacgtcctgcatttccttcttggggtatctcggttgttcttcttcaaccgttgtagaactcggttcatcaccccggttctcttcatcaactcggacctcaatatcttggtcctcatcagcttcttgctggagatcatcatcttcagtttctccccctgcttcagtctgcacaagagggacgggttcttcaccacggtcacgagggcagtcgggttcttcacgtctgacagtaacccggtcttggggcttcgagatatcatgaagagtctcatcttcatgaaagatcacatctcgacttctcactatcttcttcttgataggatcccacagtctgaacccaaactcggttttcgacgaaccaaggtagatgcattccttcgtcttctcatcgagctttgccctttcatctttagggatattcactaaagctcggcatccaaacacctttaggtgatcataggtcgctttccgacctgtccagacttcttcaggaatgtcttcttcaagtggtcttgatggtgacaaattaatcaagtcaactgctgttctgacggcttctccccaatatgctttcgacaatcgagcattggatagcatacttcggaccttttcttcaatagtccggttcatcatctcggcaagtccattcaactgcggagtctttggaggcgtcttctcaaatcggatcccggcttgtttacaataagcatcaaagggaccgcaatactcaccaccattatcagatcgaaccactttcaacttcttgccagtctccctttccaccatcgcgtggaattctttgaaacattggagtacctggtctttggtcttcatcaaataaacccacactttgcgggaatgatcatcaacgaaagaaacaaaatacagagctccaccgagtgatctctcagtcatggagcatacatctgtatggacgaggtcaagaatcctcttgcgtcgtctgggctgatccggtctcacaaacgaaacccggtgctgtctttcagctaggcagtgcgagcaactctccagcacttggtcattcaacccggtcaatagttctttcttactcaacatctggagtcctttctcactcatgtggccaagacgcttgtgccacaactccaggcaatatccatctcggacagaattggtttcttcaccaattgtctttccttgcatcacatacaaggaaccatctttctttccacgagccataaccaaatttcccttggtcagcttccatatactttctccgaagtagtttaccaacccggcatcatcaagcttgcctaccgagatcaaattcaaacgcatgtcaggtacatgcctcacatctttcaacagaagtcggcacccgacatttgtggtcaggattacatcaccgacaccaacaatcttgctggtcacctgatttcccatcttcacgataccataatctcccttcctgtaagcggagaagaatccctcatgtggggtgacgtggaacgaggcaccggaatcaacaatccaggtgcagtcatcatgggctatgttcaacattttctcactgaggaggaatatctcggtattcgggttagtagccacagctgtagtgctcgtatcattcttcttctggggaacaatctgatctggcttcacgcagccattctgttcatcattttgcaaggcccagcagtccggcctcttgtgtcctaccttcccacagtagaagcacttcaaatcatgttttggcctagtccggcctctggacgtatctcgtccacctcgacctctgcccttgtcacgaccccggtagtcggtctttcctctgttctcagcaacgttagcctcaaacgtgctggatacacctcgttctcttctcctggcttcttcattcaggagactgtctgtcacggcatccatcgtcagttttccttctggaaccgagttgctcaaagtcaccaccaaagtatcccagctttccggtagtgaactcagcaacaacaaagcctgcatctcgtcatcaatcttcatgttggctttggacagttgattcaaaatacctttgtaggtgttgaggtgctcaatcatactcatgtcgtccttgtactcaagcttcacaagccggcgaaccaggtgtgctttgttcctgggagtcttcttctgaatcatggattctaacttgttccacaattcgtacgcgttcgtgaactcggacacgtgctcaaagaggcttttgtcgatatatttcctgatcgtggccacggccttccgactcaggatctcccactccttgtccgacttcccagtcggcttttcttcaagaacaatgggatcatataaatccttgcagataagatgatcctccatcatcgacctccagtagttgaagttatctgcggtcaacttgaacatatctccgtcatgagttatgccactggtctccatctcggctccttcagaacccttgaacctgggctctgataccactgttgggtaatctcggaccctcaaatatcaaattgcggaagcggaataaaatcaaaaaggggagcgagagagacaatcaaatagctttacgtgggagaaaaccttcttcaacacgaagaggaaaacccacgggaccaagtccagatcaaatattcactataacaataatggattacaatgaatcaaatacaccaatgtggtggtacactcaacctctccaacaatggtggtcactcaaactccctagagtgtttcactcaaactctctctagagatctctcaaatgcatagcacaaggcttgctcaaatactgcggaatctctcacgcagtcaaatatcaaatagcggagtatctcaacgctctctcaaatatgcaagcatggaggcttgctcaaatgtgctctcaagattgtcacttgaggctctcaaatttctgtgtattttgccttcacccttgctcatctatttatagggtgaaatgggctgggtttaagccatcaaatcaaataagattatatcttatcaattaaaagatatctattatatcttatcaaataaatatcttctcaaataaatatcttatcaaataaaaataagattatcaatcaactaaaaacggaaattatccaacagtttgtggcacgcatctggttccatttccctcccttatgccttatcatatgctcatatgctcacactatcacattcacatcaaatcaaaagaggaaaataagatggtcaaatgtgatgtatatatccaacgccaaccccatttccccactcttctgtatttgtaaacttctcacttgtctcgtatagttgcatacactatttttaattaactataagcaagagaataagtctaagcagatccaaactaatgtttatgtatgtgcaataggactttatatacatgaagcatatcaatgtgtgtgtaagcattaagtttgttttattatgaacttttagactttagctccatatataaagtttcctgtcctcttttaattaattagatgtacatacaagtcaaaaaattcaatctgaagaatagatcgaggtaaagaggagatcaatctgttaatgaattattaattaacttcaggcgtctcataagacgaatcaaagtctaccatttgtcgaaataattagatccttactatgttatttaggtcatctagctctttatattttgttattcattcacactcttccataactcaattagcacttagataataatatattgccccttcaagtgtctcctaacccgaatttacgatggaaaagatatctagcattgaatgatttctaggatatatgataaaatagtagaaaacgcctttaatttaattttagtctgagattttttgtacatggctacctttttttatttcctttttctttttcaattcacattagaaattaaagacttttttccccccactttagtgtagactaggagactctaaaatagtatttttttagataataatatatattgacaatctgcaccgtataagatatagactgtaaagtttattatcaagcctatattggtgcaaatcttattttgtcttgtcgttataaagtagctaggcagtgtattgatgtcaaaaggactcactatttctttatttgcttaagtttttaaagaaaatatataaataatttaatttatatctattgttagcgttaatttaaccaccacaccattcttttaattaatatatgtgatgattgggtaaattcctattgtgtaaaaatatgttgcaatacatataacttaaactaaaaaaataaattattaattagattttgattatgatatagtatttgaatataagttatttaatctgattaaaatatgatagactcatttaaaagcgaatatttttacaaaacaagaattcataactttatttgaagattaccatatacaatacttataactacttaaactgttaacaagtgacagtgtagcaaaatataatcggaaaaaaaaatagcataacaagttttagctttttacaggtaaagaagtgaaattcgatcgttgaatatataattaaactttctgacattcattccttcatgtatagtaagctgaaaacaaaaacctcgattgaatcctgggatgttcactaatgaccagaccctcaacttaaagctaaagccgtttgttacaaatttacaataatatttaatcgcaaattaaacatgaaagttgagacctctttttaattgaaaaggtccccttttggagacaaaccggtgaatgatcccttaaaaataacagatagggttactgaataatatatatgtctgctccttctcaaagtaagacctcccattcccaattcccatatatctaatatctctgagaagaaaagttggtaaaccaaagacttttcttctgtttggtgggtgcaaaaatgcaaacccaacaatcagagcaccgcccattcaacaatcagagcacatcctaaatgtccccaccaaaccaagctgaaaggaacgtcgataaaaggaggatcaacatctttttattcttgtattcatttttaagtaattaggattcatgaatttattttcaaaaatgaaaaaaaaaaaacatagttcatgatgttatactatattttaattagtggtgtccaatataattctttaagaatatttgatgtgggagttttaaatatgtatatttagctgttgatttcatttctcatcgagtttttttagatttttataattaattaaacaaaaataaatgataaagtattttaaagcatataatggttagcgagatttttatttacgtgatagcatattagagtatgatgatggtaatttatatcattcggcgcaattttatcaattatcaataaatataaatttgacaaacaaatatatttttattagtcaagtataaagtaatttttggtacaaagtagaatataaagtattcatatatattagaaataaagagaaaagaaaactaaaatagaggttgtagcattagcatcattgctttgcctttcccttgacttgactccgctgaccacggaccacaggattttattacaagctggaatttttagtttaactacctgagttaattaagctcaaataataatactacattagattttattaaatatatagttttaaattatcaatgaattatatctgttcacttatgttaaaaaaataattaaagtgaatatttgttattatgattatatgatatttctttatttatggattatttaaataatcttacattataacaaagttaattttcttttaatatatatgttgtgttgaccaaaaaaatcaaaagaaatggatggcaagcaagatttcctgggttcatgattatatccttctttctctgacaactgaaaactctttacgaggagcatgaaattgttgacatatttgaatgcttttgtgatggattagacttggtaacttcaatccgatcgacttgctggcattcatcccgtacaacgttaatttgaatgctaaaagcaaaaaaataattagatccaggatgtgattctcttctctctagctatctagatttcttttttgaatgatctctatctagatttaaaatctaagttttcgatgaaaattgcaaaaatttcttgtcaacaataagatattaggttttttttaaaaaaattatttatcgtaatcaggaatatgatggaggcgaacaaaaactttaaaatgagttaataacaaatgagactcatcaccaaaatttatttaatttagaaataacattgatgaaacccctttttaaaagaaaaagaaaatgttttcagaaaagaagtttggatttaggagctaaatacacaaggaaaagtgataatatcgtattatgtacgttttaaaagaatagttactcttaaccaaatgtgtaaaataatgatgattttattttacttccatgtttttgtttgtaaaaagaatgaggaagaaactttatctatttatttaagaaaatggatgtatatttctagttaagaatctcgtgtgattttgaaaataaaagggttgtaatgtctggagtctacgattgacgtggcgagtaatacgataatgagtatttcttgtcagccgtccatcttaatcattcttgggccacgagcatggatgttctccatatggccaatcctaggcagttcctctgttacgaagttgtaatgcggttacaccttactaaagtcgttgttatgctatcgtaacaacctctaagttaacaatctaggattttcaaccatcattataaataatcaggtcttatatttactttaattgaactgttctaatatactattccctcaaacactcacttgagtatagaattccttttgcaggtatcttttgtcattcctcaagtagaggatactagcggattcaatatcacgaagatcactggaatcaacactcatcactagaattaatactgataattattaactctaatgttagatccgttccaaattttggtaagtacataggttaaattttgaaaaaaaattagcttgacaaagagaaatgtcactcttaattaattaaaaacttatatagttacctggtttttttcttcttttttttaagattgtggtttgattattattttttatttgattattctaaagacataaaatgttgtttcatatcgaattagggttaaaaaagttgcaagtggactaaaaagtttaaactctaaaagttaaaaaatatataaaaattaaatataataagtaattaatttggtgaatcagatatagattagatcagattctgaaaattaaaatttaagattccatcggaattaatcaaatcaataatttttcaatctaatttttatcaatgatccgaaccattcaattttttttgttgaattagtttgggtttcatcgaattatcagattgatctagatttgtgatcatccacttttaaatacaagatatttaggtatgaaataccaagctatcaattctatttaaagcttgacctttatctcatcgtgtcttccttgatgtccaataatccatgcgtgtatttcttcaagtgacttcaataagactttatcataagctctactttaatggtttaggcgttgtattatttcatgattctgctctactaatacaaactagatctttattgtcattaatatcagcaaggtatgtttcctttattgggtcatggagctggaccaagatctttgtctttatcatcacattctcatcagattttggctcccttaccgtatacacttgtacaatctcacattctggctccttctccaccaccaagtgttgtgcattctcatattctgacttcagaaagtcctacaaataatctggttctgactactacacattacacaagtcttgtacctttaccttctcagaccctatacatccaagaagaacttggcagcaaggagattttcaagatttgtcatccgacggattacatcgaaattggccaacaaactaccactgacagcagcttactttctacctattatcttttttctatatttctttcatttttactagttgcagagcctaactattgaaaatatgtttcaatattgaaaatgaataatttagtttttaataacttactaattataagaacagtctcttatttaattaatgacatcttaacccttttaaaatatttatgttttctatttctagacacgattttgaattttttttataattatttcaatgtgtaaagtgtatttcattggattcatctacatgaaaattataagaatcaactaaggacttgtttatataagcttctttaaaagtacttctaaaaaaagaaaataagaagaaaaaaatgaccataaacaaaaataagttcttcattaactaatttttagatattcaccaatatagtttctctaaaagatgagatgacatctacaaatttatagtttgtttgaaatagttttacttaatttaattaattagttttgatttaaaaatttgacttgcattttaaaactacaatctagttacaatatatcaaattgatgagatttattttttctaagagtattgtcatcttattaaaatttaatttaaatttaatttttatatatcacattaaacatacacaaagataatatatcttgtttcaaataatttatttccataattccttccacagttttagtaatcttatatctttaatttatttactatatattaataaaataaagtgcctattttaatactaaaggcatttttaatatttttttcttcatatgtgtaaatttatcatatttagtaacatgatattttccttacatgttttaatttaaaaaaaaaaatacttatactttggaaatatttgtgcaatgcaccaataatttgtttagtatgcttagaccacatttgttgctacaggagcatttaggcaaacaatatgaccattgaccaatgagctcagttgctggaaaacagttaacaaacagtaacatggtaagactgtggaatacaagaccagacttggatcatgtcaagattccaaaagcacgagagccttctattctcccagtcttctctacagttatgcataacataaaaaaggctcagatagtttgctagagacactgtgaaacaaaggctccaaacatgttggaaatgccaacaaaggttagtacagttggtaagaactgagttcatattccttaaggatatataagttcattctattgtcgatgtgaaaactttggtgagagataatctataagcatctttgtaagcgtttttttgagcctcgagacctccctaggtcttggtgaaagccggtagtttgcatgattcaccacctcttcacctccctccggttcctcaacctgtccttcaatgcattatccagcaaagttctttaaatctcaggactcagcagacaccgaacaagacctcgaccagaaaggagaatttcaagatttgtcatccaacagaggccaggaagaacttgattgccttggaagccattcttcttggtcacgcttcctctctgtcccctcatgaactcaaaagcacaaataagttcattaaatcaaagttccctagtggaagaatggtacagtgcaagaacattgagcatcaaaactggtcaagaaatcactagcagcttagtattttccacatatcactcttcactgtcattttttataattagttgacaattgcttatgcggcaaaaactgtttgcagtgttagttgcagagctaacagaataattgcagtgttactgggccgaacagaattacacgctcaatgttctcttcaaattcccctctctttccctcttccttgctcttctttctctacagttgacttcttttttgtcacgagggagtgaaatagagtatttttgtcattcatacgtgcgtgagcgttcaattgtagatgcatcagacagaactgaacacgcatatcatgtttggaacaaaggggcatgcaattctatattattttaatgtgagaaaggaggtgtaggtggctaatattgcgaagtaaagcgtaataattatatgccatgagatatctgttggagaaggcaattgacatgagccaagttaggcagagttaggctgagtaatgcaaaaaacaataatttgtggttggttggcattacttaactccatcctacaaaataatcattcttttgggatcctataaaatttattgtcacaattcaactacttaagcaattctatgaagcagaaaagagcgatttgctctttgttactgcacattttcctcaaagtgtcttatgtttggtgaaatggatagtaagcaagaacaagacaagggaaactcaaacatgtctggcattgatgtagctctaatatctcccaaagtcccaaaagcagtttcaccagtttcctctgcagcagaaggggacaccttaaggcgaccacgtggccggccggccggctccaaaaacaaacctaagccaccaataattgtcaccagagatagtgctaatgcactgaaggctcatgccatggaagtgagctcaggctgtgatgtgaatgaaagtttgttgaactttgcaaggagaaagcaacgtggcctttacatactcaatgcaacaggctgcgtaacaaatgtaacattgcgccaaccaggctcagctggtgccattgtgacccttcatggtcgattcgagattctttcactgctggggtcaatccttcccccaccagcccctccagggatcacaggcctcacaatttacttggcaggtgctcaagggcaagttgtgggaggtgctgttgttggtgctttgattgcttcaggccctcttgtaatcatggctgcatcattcatgcatgctactttcgatcgccttccattggaagatgatgaacttgcttctgcaatgcagaatcagcattaccaaaatggacgcacccaccatcttgatatttctgacttgtatgcaatgccacaaaacctgctcatgaatggtacaatgcccccagagatatactcttgggcaccagggaggaacttctcaaaaacctgaaacgtagcatactatttgttagttgttgtctcacattcacaaaatgtactgtactgtagctatcaggggtcttccaaggttgacattgcaaaacaagatgataatgcttattctgatgtattaagaattattttagcaaattaatgggtgtaatgattttcaatacaataagatctacttttcagagttaatattgcatattgcagcagtttgtgttagaacttcaaagcaaacatgcatgaagcacagaagttgagattggtaagtctagcaaggtttgaattacattcactagcaaaaaagtaaactttagttatcactacactaaaccagctaatagtaaaggttgtataaatatcaatactaaatagcttttttctggaggcctaaagcaagagtttgagtgaccttatgcatggtttagccctgcagacagacctagattcaaatttatacaagcttaaatagacaccacgttctctaattaagttaccaatatgactggaataatttgggaagacataatataacataatgaaatggatttttgcatatttaaatttcatgtcatggccctgtgcccctatcttactctttctactttaggaacttttttccctaattaaactaaaaatcccagtgtattgacaaacaaattggatatatggttcgattgtgagatcctcatatattgtaactcttctctgtattaaagctacttccttacatacagattgatttttaaatttcacgagttcatcccttcggagataatcaatcttgaagtacaaaactggagtcattcagtaaagagtaaatctctcgagctttaggatgtagcctccccccagccaagaactcatgaacctctccatatagttctattgaactgcatcctggttccttctctgccaatctttctctcatcaaaattctttgctccattgcctcttcaaattggttggatgcagcctgaacattagacataagtaaataaccactggcatcacttggatttaactcacagactctttgtgcagctcgtttcgcaatttctacattcccatgcttcctacaagatgaaagcaaagccccccatataataaaatctgcctttagaggcataccctttattagttgttcggcttcttctagtagcgcagcttgacctagcacttcaaccatgcaagtgtagtgttttatcgatggctcaatctcatacttatccatcatcagtgcaaaatagtcccttgcttttcctattgctcctatatatttacaagcagttaaaacaccaatgaaacttacatggtctggctttaaatctgaggcttcaagcttagagaagtactcaattgcttttctctcataaccattcatggcaagtcctattataatggagttccaacatgataatcctcttgtgggtgatgcctcaaacacttcaatagcctttacaatagctccacacttgcagtacatgtcaataattgctgtgagaacaatgacattcaactcaaaatgacccctttttacataatcatgaacccactccccatgtttaagtgctcctaaatgggcacaagcacttaacaagctcaccattgtaaattcactaggctcaaccctttctccctgcatcttgcggaaaagctccaatgcctccatcagcctcttattcctaacataaccactaatcatagaattccaagtaactctggttcttgtaggcatgttatcaaacaacctcctagacttatcaacctccccacacttagcaaggcccataatcatagaattgcaagccaccaaatcaagttccagaagttcatcaaacactctcctagcctcactcaataacccactattagcatacatgtaaatgatagtattttgaataaactggtccttctcaagacccaacttaacaaccctcccatgaagctgagctccatcatagccagcacccagttgagcataagccttgaaaacagaagggtaagtcaagcgttgtggctgaactgaagaacacaacatatcaacaaaaagagatattgcaagatgtggggttgagctccgagagaagcctctgatgatggtgttccagcaataaaggtttgggcttggaatggtggtgaagagcaagtaggcatagttgatgtcaccggatgaagaggcgcagaaagtgaggacgcggctagcagcaacggtgtggtgagcaaggccggttttgatgatgtggacatggatcttttgaaggtctttcatgttggagcattgggtttggagcatggtgaggcatggttggtcggagatgaactttgctatggagggtgatgatgatgatgatgataatggaggaagtgcagaacaaagagttgacattgtcattgtgtgtggtcgggactaaggaaagatagatgatgagtggactctacacttcccttttgagctggaaattcataactaactagatataaatctgcaaactgtgggactactaaatatctaagaaaaaaaattatcccctctttatcaaattagaaaacaaattataaaatgttttttattttagtggattcttttaaataattcaggaatcaatacatgattataaaaatatgaatgttttaatattcaatagtttaaagccaaaaaaaagaaaggaaaaatatttaacaaatttgtttgtccaaaaaagtcaaataatataaaagagtgtctttatctatttcaaaattattagattagttgtgttttactttaaaagagtgtctttatgactttatcttttttttttctttagttttattttctaatatttttacaacattattttatagtattttcctattcaaatgaatgtaatttaatttgtaacgcacattgagtttgtgtaaaaagatatgagtttgatcttacagaatacatcgttgaaaaaatatgaataactttaaatatcagtatgtttgaatcaaaaattagtcctataattagcttaaagattcaaaatttgtaaaaatactgaggtttcagccaaagacaaaaactctaattactactattaaaaaaatagaatttttctaatttctgaattctattatcatgcatttttttcttcgaggttcttttgtaggctatttagcctttttcaagttgtttttaccattaagctccaaatgaattacatgtcaaagtatttaaccttatagttaaattgtgatatttgtggccaatgcgggttggcagagtggttaacaatccagattgaacttttatatttttcatgggtgtgggtttgaatctccttgatgtccctttctctggttggtgggcatccttcttcaaagagatcccttgacatcttgtaactgagtagttgcaacctaatagaattacttgaggatctagcatgtacaatattcctttaggtaataaccctcaattgacagtcctagcatgtctatgacattttatctagtagtatgtgaaatatctttccattttaccattttcaacactaaaaagaaaatgtgatatttgtataagaaaaaattgactaaaaaaataataagttgagactcaatcgcatttgatcatcctctaatatgtcacttactatctttcatttagcactttctaacatactaagtatttttaaaataaaaataagttataaataaattcatgtaacctttaatcaaaacccgaaaatactgtaataataataggctatgattttcatgatataacatataaggattggatggttatcaatcgtaaataaattctacattatcatattatcattaatattttaaattaaatgaccgttcaattctaagattggtgtcaatcaaataaaaaaaatcaagtatgattgtttgtattttaaataattgaatcattaattcttgacaataaattattttccgaattaattgtataattacaaaaataactttagttttggggagaaatttttttggctaatgtatattattttaagtaataaaagattttagattttatgtaaatttgaaaatgaaaactgaaaataaacattcacaccaagtatcacctaagatttccaccttttttatggaaaagtttttgtgaaaaaactgattaaaaaatattcttgggaaacatcattcctcatgaatgttattttttaaaatgcataccacacgtggaaaactaaggaggcttttggtagaagaaaaaaaatttcatgctcgaaaatcatgtttccataaaatgagtaaaatttgtttgtttgattggtcatcagaaatttatgaaagtgtcataggaattaaaaaaaaggtaatatttttactgtaataaaaaaaattaatctcaaaaaagtattctcacatctctcatgagaaagttttcgtaaaaaaatatttctgaaatattatttttcataaattttatttttttaaaatgatgatcaaccatgaaaaattaaaattcataatcaagattacctagaaactcaaaacttatccaaaattaaaattcctaatcaagattcctagaaactcaaaacttatccctatcaatgcctcttaaatttcttaacatatgatttctaaaaaaacaaaaaacttctatcataccaaatgctctccacaatgtctcttttctccaattgacaaaatgtaaataagccactagtaacttgaactttacgtatggtctatttgaatataagtcatgagtatttttgaaagtttttttaatagaaatataaaacattttcaagtagagaaattctcataaacacttctaaccttatatccaaccaaacttataatcttatacttccacaacaaagtactaacataatgcaagacatagtttagatttagatcctactaagaataaaggagaaaaaacaagagaagaagaagaaatagaataagtcatagacaacagtaaaaggggaaaaatagaaaagagaaaggcaaactgtacacatcagcaccatcattacaatcatcacttacaagcccacaaaccgagtctatattccaaacaattctttctttacttcgttttcaaccttcttccccaccttttccctcctttttgctccttctcttgcttcagttgcttgcaccctccaacactctccctcaccacaccccattttcgctttcttaaaccctctcctttgtctctcacaacctcacagtcttccactaccactatatatacttttagttgcatgattaacccacaaaacaaccatcttcctttttttccctctctagttcatcatatcttcctttctctttcatttagtcaaaggaaaaactactattactggggaaccacattaaaaaagaagtgagaaaggacaagcaagtgtcaaagaagaagaagctgaatactaagattaaagatggaaaggagtgtattttactatgtaatatttctcttaatgtgtcatttcctctgttcaggtaatcccctttgtctagttttttctatagttcttctatcttccttcttcttcttttttatctttggtttagctctgatggctctattctgatattgtttcttaattctcagtgtctttggttctcgttttccttctttttcaaatttccaattgcttattctttatctcctgcacatattctgtgtttttctctttaatttatatttttttggaccccttgaatttgttttgaattctgaaaccacaaaaactttttccttctctcaagtttggcatctcaattgttttattctcttctagttttttagttcaaccagtaccattatggatataaattttggactgattaggagaaaatcacttcttttttttagtttgatagtccatcttggcttctttctgttggaatatagtttactaattgagcttttcactttttcttgtttatggataataagtttcctagatcaaaatactgtctcttgtattattccattaaatacttgttccagcaattatagagccacaccatagaaaagtttaaacaagtccttttcttgctaatttttctggggtttcacatagtacagttgcatccaacctttctccaattccaccgtttcttgaaaagatacaaagggcccaactgctttgactcacatatgcctctttctacatagtataccctacctgtccttaactgactgcccttctagttgcactattccaagttgttgccttttgaaataatggagaggtctaagtcttaagggcataaatataataattagtttgaatcaaaatttctacaactattccgatgaatagcaaaacagattttgttttccataccagcatgaatgttatagccttataggcacaatttgaatccagttacactttttttgcatccctttgaaaaaggaaaaggcttggattgatttcaaatccatattttgatttctctcttcacatgctttggacatatagtacagaacaaagtaattcagttgttatttcaaacataggttcaagtaggacacaaaaggaagtacctgtatatgtgaatgtactgggacatgatcaagggaaacaagaattcactgcctcaatttctacagtccaaagggatattaccactcccatcaccaccattccaaacttagttcccaccactcccaccatttcaacatctccattcctgaatcctaattccaatcctaattccaatccagacacagtctgtccagcctccacaagcccatttaccactccaaccactgtgaattctccaatcttctcaggtgcaagctggtgcattgcaagcccaactgcctcacagactactctacaagttgcattggactatgcttgtggctatggtggtgctgattgctcagcaatacaacctggtggaagctgttacaacccacattccatcagggaccatgcttcttatgccttcaataagtattatcaaaagaatcctgttccaaatagctgcaattttggtggaactgctgtcatcattagcactaacccaagtaaggcctttgctattataattctcgttgcaactttttcaataacgtcacatgtattttaattttaaggcaagtccaaaggtatggtcaagtcgttgggtatattgaaaattcaagcaaaaattaggcttgattacaaaatttttccttactttttcaatttcacaacatctttcaatatttttttccttccaaatttgagtccattattttagttgtgccattttgatttatctgtttacttactaatatataatatttaatagaaatgttaacatgtcactataatgcattatcacattaatattttcatattgacataatattctattactatattattatattagtatttatattaaatattagattataagttgacatataaattaatgcataattaaaaatagagatcaaattcacaaataaacaaaaaataaaataacaaaatttgtaaaactaaaaaaattaaacttagaaaatagaagttgaagtttagtagatgatgaaaatataattataaaaggaaaggagtatgcaaactagcagaagaagtgtgtgtcacatagttttaaaaatgggttaggtgactaagtcatggcattaggtcattagatcagtggtcgaattggtgagtcattaattgactcgcatgattcggtctgtaataaaaaatataaaatttttatatctatcttaaaatctttctcctgaaatacattgaaattcaaaagtattaaaaatacaaataaaatataaagaatacaagttaaaaaatgactattatctctaacatttaacatcaacgataatatatattaatattcacactaaaatgaaatatagtcatatcacatcaatgtagattataaaatataaaagttcaatttaaagtttcaaatcacaattttaaaaaatgatccgagatcacaatttcacttgcaactcaaatacaattgtggtcacgtctaaatcaatttaacttagcaaaaaatgcaattacgaccacaagaaaggctcaacaataaatgaaaagatcaatttaattcaaaattacacacacaaactaaaataaaataaaatgaaaaagaaaaaataaatttagttggactcacttgcaactggagaacttacaaatgagagaaaagaatgagaggttgtcgaacacactgaatgagactacgagaagaaaaatgataggtcgataaagtttttaaaattaaaatgggtttaaatttaaattaactcattttgattataacaaaaaaaaaaaaaaataagtgaccatctctggatcgacgggtcaccgttcaaccaaaattccgaccgaggcttttgggttaaaaaatgtaaccaattgaacttatgagtcaatcctattcaattatcgaatcgtgattcaacttatcgggtcgatttgagttttaaatctctggtgtgccaaagagaggttgggtcccttgggttggtaatcagacgcatccctgcgcatgattgttgggttccttccattctgaaaagactacaaaaggaagaaacttttattgcatatttgaattgattatagcctgtcacttggggttggggatgcaggagctacaaagctgacatctgcgtgatgcaaaagtcaaacttttattcaacttttttggaagcagcatctccaaaaagcttcctttattggccaattggggtaattttttttcaaatttatcatttgaagataaaatttaaaaattaatattttaaaataggtaaattgtaggtaatttattatttttgaattaaaaattataacatgtgttattatttcttttttacatgaaaatcataaaaaaaatattttttattattttaaatacatcttaaagtagtaagattttttttcactcagccaattttaaagttgtaaaataacttttttcttttttcattagagtagtaaattattttatgtcttcaaattctttttgtacttttcttaattataagtaattttttattttaattatttaatgtatattttttagttttattttatatattttatatttttatataatattttatatttaatattatttattaatgttaaggactattatttattttgtaaattaagaaaaaatacaaaagagttaaatacctattatcacaaatagtatctataagtagctattcatcgcaatttttttcattaattgtgcttatataccttgcttacgaactatacagagaaaaataatattagccacttaaattcaaaatgaagtaacataatgctttgtacaaaatttatgaacttagtggttaggattatttaccgataataattattttttaaagattttaacttaaaaaattatgaaaaaaaaatttcaaaaaaataatgacatatatatacacttatgttagtttctttttctcttaattgaatgtcttgcttatttaaccaattataaatttgtaatattcattctcacctattaagtgacgattttataaaaaaaatttcgaatataaaaatattttgtgtaagatcttgaataaaaattttcaatattgtcaataaaagaatattgttcaaaaaagaatatttttttcctttttttccctaatatttcaaaataagatctataatatcttgagaaatcttcaattttacttttgacatgatattaaaaagtgatctaacatctcaattaagaatttaatattaaagatgttgtgaaaagtcttttattatctttatcttttacagaacatatacattaaaatttgatgtacatttttgttttatttttcagcatagaacactatgctcctccaatattatttaatttttggttgttgagaacatttgatgaatgcatttacgtgttttgcaggctctggggcatgtcaatatccatcaactaggtgacccaatcttgccatatatatggtttcattttttttaatatacatatactatgctttatttgttactatgttgcaacaattggaacagaaaatatcatattaattaacttaatagttggtacctaaaattgcagcactagtacatcagtgttgaacacaacaaactcaagcggtgccaacgtttttggttcagtgccagtgcctacagaaccctctccctatgctgctgctgcacctgacacattaaatagctttgcagatatttgtgtcgttctgtggataatttcaactttgcaaagaaattatctctaaaatggttgagagttggatgttgctgttctgagcaaataatttttgccccttttacagactttttgggagacacaaaagccaatagctacatgaccatcaacagcacataaatggtagaaacacatggtagaaagaaaaggcaatttaagatgatggacatatgtagagatatatactgtacataacttttttattttttttgtgttgctcatttttttacgttagaattgttagaacttagaaaaataaatatatctttgaagttgccttatgaccttatctttttagttatataaaccaggatcagttttgttgtctaagctaaggatctacatctaatctaatttttaacaaacagaatggattacactaaaaagatgtaaatttcttacatatataagtgaccaactcatacaaacaatttttctttacgttttgctttatataaaatatcattatagaacaatttgaaccaataaaataattgttgttgcacaatttgcaatataatgtatacatgttgatttaaaatataatttcttagatgtttatttttttccaacgtgtaattaagatcaatatgttggcattacaaaatatgtatagtggtgggtaccatcttttgattatgaccattggagtttgtttacatggcatgtactgaaggcacaggtcccttactcataaattctcacaacttcaactatgcaaaacaggaagagaataaacagtcccaatgtcacctacaacaggtttagggttacctttttcagtcactatacaaccaacacccttctttacccttcacaagtaataacctgaactaccttctaggaacattctaggaacatgtcactcaccacctattatgcttggagtaaatcaataaggtaaatactaatcatttcattaacaacactggttaagaaatttaaaataaaaatatttttattgagaaataaataattatactgtccataatttttattttattttttatgatttatataataaacaataaatatcctcttttaattcttaactaatgtctttaagacatcagttagtaaaactcattgaataaatgtataatatatagtgacctttaaattcacatcttaacttattttaaaagaaaactaatcatcataaaaaaaaaaactaagtttatatgaattattttttaaaataacttttgtaaaattaagtttgtttttgaaagtaaagataatttacttttttaaataaaatggagtgtaaattcatcttaacttattttaaaacctaactcatattaaaagtgtcttttgttttgtctcgaactttagaagtgtcttctattacagacattaactcttaatttgttagtatggttttgaattttgatagaattatttttcatggaatcgagtttgggctgttaatggttaaatgtgattaatatgtgtgtctaaattaatttaaatcacacgcttacattagaacgtgtatttttttattaaaaaaaagcatgaaaatgaattttgttactttagagcaagcagttacttaatcgacaaataagagtaatttagaagtactattaaattcatgtaattgaaaaaaaatgataactacactgaaggagtaacacgcaaggaaatgacaagttaagaaaatgtactataagaaaaattaaaattagtgggaaaattaaatatatttttttaaaaaactatcactaaaatttttgtggcgattaatgataaaaaaaataattttcgcctttaaatttgatcactaattcttttatttgtttatagtaaatttatcatgtatactatatccaactcaaaatatcttgtttcttttatacgtgaaaatattatgagatttctaacatgtatgatgtatctatcatttttctttataattctcatatttattatatatatatatatatatatatatatattatcaatcaattagaaattattttaagtgtgacttttaaagtaataattataaaattcaaacaatttatcatacatatcaaattataattaaatgatagtatttttttttaacaatatgagtgcatctagttaaatttaaatagtaattaattttaaagaaaataatatcatggatccttttgctggtatctctcttttgtttgatagttctctgcagttgcgtatcaaacagtaaacggttcctttatccaaacaaaaaacggtaaacggttcgaaattgttcaatggctaaaactcggagtggacttcgctattctcaactgggcctcttttttacaaaaaaaaaaaaaaaaaaactgtggattcatgattgtgtcattttatgaccaaaagtttaatgcattgttaaatttaatttaacaaaatgatgcttttaacaatttttataggcatgaaattattgtcaatactataatagactactttttaaatatattcattgttaactgggcctcttattcttattattgtccctcaacggctcaaccacacccaaaatgatataatagactacttgacagttaaacatacatttaattatttgatctactaactagctaatagcagaaaactaatttcataaatgggaaaaagacaaatatgtgtgcatgtgtataaaactctttattatttatttatttttatttgagtttaattacttatagttagtgcaaaatatttttgtacaaatatttcataacttatacgtgagttttgttaaatgtctaaatctgatgaaccgacattccatttaataaactcacatagtcacatacccaacaacaaagagtgttataagaatgttttactatttcttgtaacattaatactcatttacgtttgtctaaccttataagttttttggagagtgatattaaaaattggtaaataagttccttttataataactttatagaacaaattgcataattattttaaatttcatagtaaaaaatgactcaataaacaaagtttataactatcataaaatatgtggctgttccatggttttgtaagatctttatgcccaagtacagtcttgactttgactaaaacattgattcagtttggcccatagaagcaacgtgtcttcatatttaaagtcttgagcaaaggggttggtgtagtcttgttagtttagttggtagttcccctgaccctagtgcaatattgcttgaatatgcctaatgataataataggataacaaaaatatcttaccaaggctaaattctaaattcttctattttgttaacatttcttcatcatattgctaaaaccttcttttttttttttactttttcaatttaatttatgtcatgaaaaaaaatatgatgagttaattaatcaatttgtttacaaagagatattaagtactagcaattaattttgattatttgtcaatgtattttttttttgcaatatttatcatatagtagtattaaagtgcatacaatatcatttaatgaatattagattttagcgtagttaaattaactaaattcgtatcgacaaaaaattaaaagtctgtccacaaaaagtacgcggtgaaaattaacgtgtcaacatattaaaccccaatccaaatttgtcacattgcaaaagagagacctcgacccccgtgccatgaattttttaaataaataccaaaaggccacgggggtcaaaatatttgccggaatgccacgcggcctatttcgctgggcagtgacgtatttcgctatggtctgtagcgaattacgcgaccaccagcaacgcgccacgtcagccaacgtatttcgctggactgcccagcgaattatgccgcgtggcagtccgggaaatactttggcccctgtggcattccggtaaataattttaaaatttgtggcacaaaggtcgaggtctctgcaacagacaagattaattagataaatctttcccatgacacattaattccttgaatcaataaaattaatgtgtctatctacctgtcaacatcatatgcatatatttgtttgtgtttttcgtcatgataatgataaaagggggggaagaactttatcttagtttaaaataatcacttaaagattaaaaaatatacacatgagcaaagtattgatttattttattcactcagacatacaatagacatgacttgaagtgctcctcttattcttattataccttgccttgcatgattctctaatttgttgttatttattgtattttacttactatatccgtcagaatagacacgttccttgatataagtacacaggctgaacattttttaagatgtacaatttcttttaatactatctttgtccctgtaaaactcttctaactaatttacaagaattaaaaaaaaagtagttaattcaatgacattaaatttactaataattatagcatctttataaaattattttatggtaactaatcatttcattttttttctttgttcattacatctaattaattaatgtataaagaaaatagtggttatagaattatcttctccaatattcacaagtgaaaagaagaaacaatttacaacattttttatttattaacgaattaaatttattttgataaaaatattaattaatataagagacaatttttttattaaaaaaaaaaaaaactcttacaaaaaagtgaaatacaaatttggtgtaagttatgtaagcctcatattcctagtcaagtcctagttactttaaagaagcacagtgtacgtaaagtaaatatgcttgcttgacactgtcattccgttaatatcacaatcataaatgtcatatccaacaagaacaaaaaaaaaaaagaagaagaaagaagcacaaaataaggcaacataaaaataagtgtataagacaatatgacatttcaaaatatcattgaaaagtgaaaatcccatatatttttttcatatctatcaatagtattttctccgcttgtcttcttgcacaatcccttcattccctgccagcatcatgtacttatccctcctagtaagtgtggtgcactcaaatcccaaagcacaagccaactgttgctgtatatagtttgccacttcacagcttgaccttcctccagcacatgttagttccttgggaacctttccaagaacctcaatataatagctaggccttggattcatgagaaagaaaatagggtccaagcatttcaaaccgcttgctgttgtcccatagaacatgctcacatgactattaatagccacaggaacaatctcatcagccaattcagcaaacagtgagctgaaccttagtaaatatggttccctacaagttgttccttcaggacacaccactaaatcaccttctttgaggagcctttgcatggtttcaccatcttttcttctgtcccttgttagtctcactgtcctaataggggctatcaactcagacactttgcttaggctgtatgtgactgcagtcaaaggctttgccaaacatgtgcttaggaaaacaggatcaaggagagtcctgtgggagcatacaaataggacccctttgttttgctctgacttttcatcagggacattgcctttgacttgcagatttataccactccaaacccctaatgccattgcccatccataaggaagtagaatacccaaaaggattctataaatggctaaaagaattcctaatggaaaccacataaacatatatagagttgctgagggagtaggcaggaatgctagtcttccatcatggaatattaagggctttggatatttgtcccttggcaacactgaacttgggttgcccttgccctcttcattgttcaccacatatgcttcctgtcattatcatgtagctggaattaggcacaatacattaatagatttaataaaatcatgtctactaaattacaatctaaatcaagatttaaaaaaaataaaattatccgtgactgcaattttgaccgcaatgtcaactaaaactataacaacattggttacatttgttcgtaagttcctacaatattaaagatcgtgacacaatcgagacaatgactgcaggttaaaatcttgatataaatgcaatagatttataatatgctgtgctaacagaacatatcataaagggaattaaaactgttcaccagaataatacgtacaaggttatatgttgaactttcaactttgattagtctttgttttttcaatttaaatggttttgttttttttattaaggcgtgtaacaaggtctcaggtccttggtgttgtggaaacagtgaaaggttatttaagaacaatgaagtattgaacacgcaagagttaaacagttagtgaggtgattaaacagtggagctaactagagacttaccttgcaaagggagagaaaaagatgatcatgaacactagagcttccaaccccaatatcaggctttgtgtctccaaaatattccttcagtgctctgtgcttcacaagtaagccagaaccagaaaccaaaccactgaagtagcaaccaacagtgtgcaactctgtgccaacaacagcaccgacactcaaatactccctaagaaacccttccaccataactctaggcacagtagtgaaaacaactttagaccctgctgaggccagaacctcataagcatgaaggttgagattctccaaataaaacttgggcaaaacagcccttgacatattttccatgacacttgttcttagcccacaaaaggtgatgaaggtcatgaccctaagacttaactcatggtctaaaatccacaacacaggacaagacaagagcaagaggagtgcccttaaaatgctgccaccttcaaaggcaacaagcatgaaataaggaaagaaggagtgggacctcaaaaggactctatgaatgtcacaagcaacaagtgtttgtgaacttctaccctccaaatcacatttggtaacactagggaaagaagaaggttgaaggggtggtttagatgacaaataccccaaatggaatccataactcttcatttttcttgctgctctataacacgagttagcaagaagctggtacaagacccagtctgcaagcctcagaagcaccattgggaacaccatgctattttttttttctttcaaattggttgatggtgatgataaagagaaggagcaagagagtaaatggaataagaagagtgggactgtgtctatctgtggtgaagaacaaagtgtgcagagaatatttatagagtcattaaaagggtgcaggagaaagttttcatggtagcatttggttaaccacaccgctggcaataacttcaccttccactttttttttcttttcttttgataccatttttaagcattggccataatagtagcattttttctttcatgcaagtgccctctacatgttgccagataatattagcttggctactgctgacataaatacagtaggtaggttaaaatgttggtgaccgcttaagagagagtctttgtttgaaatattggcccaaacacacactgtgcttcctattttaaatgacatcggcatgtgtgtatcatccctttgaaaagcccttcgtcaaataaatttccatccaatacttgttccattttctcttgccacagtccaatggcaagttagatcacccacatcatccaaacaattgactttttaaaccaattacacaatcatccctagtcaaattgttcctatcaataaaaactgtcgttgactactagttctagttttatttctatattctgaaagaacattgatgacagtactgagtagtgtcttggttaaggaattaagaataatttttaattgaaatattatatttttcatgttttttctctctctatgaatatgtgatatatattaaaaaaatattttttattatttagtaagtgtccggtccggacgcgcgggttagtaagatttaattcttttatatatatatataactttttttattgttagataaaatatatgtgcaattttatttagtgaaacattgtatatatcaaagattgtttgaaaaagtatgttgaatggtagtagcattttttccttttattgggaaaagtttatattaagataaaaagaaaaagttgaaaagatagttgatagttgaaagttgataattaaaaattgaaaattaatatattaaataataaatattcgataaaattatttgttgaaacaattgaaaaatataaaattattaaaaaataaagaacatatgacttataaatatgtgacttatttagaaagataataaaaaaattggataaatatattcaaaataaaaataaaaaatataaaaaattataagttagaattaatattttaaaaaactttactttaaataacatttaaaaatattaaaaactattaaaaaattattaaaataatttatttatcaaacaattaaataaatttttaattaataaattttttaaagattaattaaaatattttggacatggcagactaagtattaactttgactctgttttgttatgttgttgtctacggctctatgcattgcattcccaaggctatttactgatcataggtgggacagttatagggtttgattttaattgcttaactaatctgttgtctgtgacgtaattatcgcaagtcccgtgattcatttgaaattaattgtttaattgagataattaggcccttcggcaaaatcatactttctgcacagtctgatatatctcaggagctacagtgacttttgcattatattattcaaattaaataatagtatatatctcattctataagtgtaattgtttaatcattttctctgcatggtacttcttttacattaaacactagacgcatgagtagacttatatgttttgactgaaaatattagttattcgtcacttcaacttaaatgaagccatatttatgatagtaatattgtgatgatttgtacttgagaagtgagaagctagcgtctgttttttccatttattgtttttgccatttccttcaagccagacaaggtaggtaaaggttgagcaaattattcaaaatgtaatgacatgccattggtacacaatctttgaaaaccttatggaacttaattatttatttgctgttctgtttgttcgtgtgacggttagaacaccaattcatgtcaccctcattttgtggtttggtgaacccttaatcatttgatatggctgttcaatgcacatagtttgcatggaatcgttaagaagattcacgtatctatggcttctcatttcatttctgttttcccttcttgcgtttcttgagtcaataaaataaaatacaagtttccttaaattatttgtattattgaaatatatagttataactaataacaaactgtaactcaatgcaaagaaaaataaaaactgaaacttacgagtaattgttgcccaagttgtcgggtcatctagtacacacacatgaaatatattgttataatatattccaggtgaattcatttggataaggccactacgcatgctacccctaattaactagtatttttcattatagctttttcattaattgaattaaaaaaattggataattaatttttatacaacaaaaggagagatgagaagagaaaaaatagaaacataattattgtgattatagaaataaagataaaaaaaattgtatgatatattctttatatgaataataactcgaaaaaaatagaaaatgatacttgtataataaattgtacaataatttgtacaaccaaaagagataaacaaaaaaaaattaaaatgtaataagtgatgagtcggagataaatagacacaacaaatgatgttatacaaattattgtcagtgtatatcatttctaaaaaaatataatatatatttaagcaaaagaaatacttgaagcatgtatgtgcataaataaatatgtaaaaaagaagaagcaaaaatcgagaaagggcgataaataatgggagaaggataagagtagccaaaggaataaaaaatcgaattgataaaatgatttttttttatatataaatatacttttttttccttttatattatctataattttaagagttttacattagtttgttcaagaataattctaaattcttcaaacaatgagatgttgcaaatagcatgtcaagcaacaatcccacttggtattgcttgcataattttccaagccatacacaattgacacaaatacgtcacttttctaaataaagctaaagaatatgcacgagacattaaaagttggctgagcttgcactcaagttcttcaaaaaaaaaaaaaaacaaaaaaaacttgcactaaagtttgcaagaagttcataaaaagtcttattaatttatttcatacttggttgcttttttgctttgattgtaatttctaatgtttttattgtttttttttcattttttaaatacttacatgtttttttttaactaagtgattaaatacaaatacaaatgattaatgtgttgataatctttgcttgatcattatttgtgtatcatattagttaaaatttattagaaattataaaatcatgaaatagaatcattaaataagatgtgaaacacaaaaaaatataaatttttataaatttcaactaataaatgataatgtattaaaaaatgtgtcaatgttattaccttttctttaaatgaagatgtgaaacacaaaaaaatataaatttttataaatttcaactaataaatgataatgtattaaaaaatgtgtcaatgttattaccttttctttaaatgaacatacaaacataagaaaagtcagatttacttgttgaatgaattgaatataaatacagtattttttataaattacttatagataaatactataaaaataatttaattataaattcacccaattaagttaattgaatcatcgccttcaattattgattttttttcttggaaagaggaactgaatgtggaggcccaatcaagtgatcgcctaaaacttcttacatttccactattgtttcctacacttcccattgtacttccattatttttcattttagaatgagttatccataatgtaatggaaagtgcaagaaataataatggaagtgcaggaagcaacagaggcctaggccctgaaagcaagtgaaatgggcaaaagaggcttaggcccattagcgtctcagtttcccgccacatatatgttgatcttcccgccatctcattcacacacaccaatcacttcgctctcgatttcttcgtttcccacttcgtgaacacaattctccgattgattcggttcataatttcggtcgcaaagcaaatgatcccacatcaagaacccgatttcaatctcaatcacctcaaactatattacggttcgttactttcaattcccgtttcgtctttttcttttaatctctgtaccaaattagcatgattttcattgtttcgtactgggttttaatcttttcaacgttttctattctcttcttttcgttttctccaggaaagctgtttccttttgctgatttggtcagatgggtgtcttatggcaacggtaataatatcgccaaatccatgcttccaatgggtgttgaatggcgatgcattcttaattttaattttaaggattaaatatatatttattccttgcaaataggaggttatttgttttttagtccctctaaaaaaatcgtgtcattttagtcgtccctttaatggatgttagggtgttgttttcgttcttcacaaaaattcatctcttttttggtccttggtagatgggaagcaccctggttgtgatcaatcctacattgggcgaagagagttttccttcactctggagaatgatatatatctgcgcttccaatctttccacaatgcccacgagctcgaaaactccatcaaagaaaagtgccctgttaagatagatattggacctgtctacactgttgatgtaaaatgtccacttttatccaaatcctctctacctagatttcattattatgcttcaagtcttttataattcatgcagctataatgattaatgcaaccagcgtttcttttctttattaatctgttccttgtatttggttcagcctgcaaaaaggaatgcctatgcacagagtggtgataataatgtctttgccccagttgagagggagttgatttttgatatagtaagattttttgcttcagtctttaagtgaagcctttagctattgtggccttcttcacatttgacacccttttgtattttgggtttctataggatatgtcagattatgatgatgttagatactgctgttcgggtgctgatgtttgtttggtttgctggccgttgatgaccatagcgatcaaagtgattgacactgccttaagaggtagtattttgcatcttatatgatattggagaagtggtgcaattttgtcatttatattgttcattacattgaaaaaacaattattgaaataataagatagcggtacatctcatataacattgaaagaccatggagttgatgtaagtcacctggcagaatcctcctaaaataacataagtttgcctcacaacaagtatgattctcccaattcataacatagcaggggaaagtgactttactggatttggtcatctctcaccatgataggtttatttttgctgaagcagaaagagacatgatttctacttgaaaatttatgataatagttgtagtctagggtgtatcttgtaggtttcattatttcaacataatttcctgaacattgttattcctgggaaatataaggcttcaacaatgcctaatatacctgttagaggaggctcaatgcttaagttagccttcactctgggatatatgtatggtatggtgttgtttgattttaattacacctattactgtattacatgctttgaggttcatcaagcatctcttctgcatttattttcttcccatttctgatcttttattgtgcttaatctttattcaatgactgagtttttttgtcctaattctttatggcctttggattgagatgctcttcatatatgaaaatggtcaaaatactatgggagggagggatatagaatatccaacatgcattaaaattatatttaatagcttcgtatatggcaagattgagcccatctagtggtgattgcataaaacaaatgggtgttatttgttttgggagaagggggggggggggggtctgcattttttgtaactgttgtgttgacttttgctctggggcttctgtttcagatgactttggtttcaaacacattctctgggtatatagtgggcgcagaggtgttcattgttgggtctgtgatggaaaggcaagaaggtgaggcactaaacagtaaacaatcaaaagttatcctttatctacttgtggctgtacagtcataaattcaaataggttgccttcactcatacaggttgacaaatgagcaaagaggtgctattgctgactattttcgtgtctacaaggtatagtataatgatgacaagtgggtttgtcaatacttgtataaactttttgttgatttcatatgctgtccagggcaatgaaaatagtcacaagaaggtttctttgatgggtgctgctcttcatcctttcttggcgtaagtcttaatatgaatcattaactttctgaaccagatctcttatttcatatgctaagcagtattttatttttccaggacatcatacactaatgttctcaaggactattttgagaaaaatctgcttacaggtcaaaatttacttgctaccgaggagagatatgagaagatccttgacatgattcctgatgaatgtactttgttttctgtcctcccttcatatgaaccttgctctttcactccctgctattatcttatgcaatacatgggttacttttgcagccattgcttctgaacttaggggaagatggcaagatagtaggcggtcttctagtgcaaaagaagacatcaatgttgttcgatgggaacagtgcaaacagttgctgcaatctggaaaacataaggtattcaagcttccttttaagaaatgtagaacaaggtgacaatacaggaaatgatgcaagatttgctgaaacatgtatcatttgatattgctatttattattaatgttttctaatcctttttgtaggcacaagggctgcgtcggtgcattgaagagattgtgttctgctttacctatcccaggctagatatggaggttcatcttttaactggcctttttcccatagccactgttatctttcatgctattaccatttctgcagtcattatacttcccatcaatgtctctatagaagaccaataacaccttttgactaattttaagtttagtctgaattttgttcattaagactgttcatgttttaggtttctaaacacatgaatcatttgcttaaagcaccattctgtgtacatcctaaaacaggttagtatataattatgcacaatttttattgacataaccagttgaattttttatgaggcttgagaattcactggtgacattataatcatatggttttatgattttatctttatatttttttttattttttaactataaaattgaaactaaaaaactatctcccagttaaatttgattgatagatccattagctcatttgactgtttagcattacatggtattattctttgttctaggccgagtttgtgtccctattgatccaaaacggtgcgaggagtttgatcctactacagtacccaccctttcacaggtatacttattctgcaatgatagttttctgatatgcattccagggagagaaaaactttccaaaacggtgcttagttttcaatagtgatgttttgtatttactacttctgatctggaacttgcattaagacacttgctcccttctccaacacattttcatgtgtgaaaaggaaaacacataaggatgctgctttctgagaatttctggacatctcttttgtttatgtgaatcttgacattgtgagttgtatgtaacattgcagctgatagaagagcttaattatgaagtctcaagagctgatgttgatggtggtatgttaattttatactcaatccaattttcctgttttataaaatcttcacattgccatcaccacgtgtcttggactctggggatcctgtttatgtacattgatatgttccttcaattctaattgcaacttggattccattacaagggaaagtgatttttaatgccttgtttgatagcagaattcaatagaacttcgcttggaaatgcaattacacttttcagatcgtcattcttacagcctttactaaaagcctgcaaggtaaaaagatcatttcataaatgttggtaaagtttagaaattttcccttaaacatcatttaattgcattaaaaaacttatgcaatgtaaaaaccttgatactggtattatgaatcatttggaaaaatctattccatgtgaaagaagtaatatgagaatactaggaatgactcattttctgtttctcatttatacgtgtatgtttttctttattacaattcaaattctttaaaacattggtgttgatcttaattatctgataccttattacagattcagtattcaagtattaccttacctatcataactattttaaataatgaatattgcaggaggagatagaaaattcctataacttaaaattgcagcagtcaaagaattcccttgcttggtagtgccacctattattgattggtcaaatagagctgtcttggggtcacattagttgacacaatcaaatgatgaaatgttcgttgtactgttgaatctttttttatattttcttgcaactacaaccgttctttctacttctggtgagagaaaggaagttgatttgaatctttccatccactgtataaattttggatgaaacagttaggtgttgcgtgttatctataaaggtatttctgccaatgcgtaggaatagtgagggatcaatttccattgaattcagcagtaattttaatgtaaaggactacaagtttattcattatatagttttccgggtatttgaaaatttgaaggactgaaaatattactactattgtcacagcacagcacttgcagtaacactacaatttttttttcatactttgtctggagttttgttttatagaaaattaggtacgtgaccatgctaggtcttattgtggtttcattaataaccgatgtagttactaaattcccactatacttaaagtagtccactagatcgtttgacattgcgtggcaactaaggaaaaatgttttgttgtgctgttactaacacttaagatgttaaagtctctcacgagacaaaagattatatagtaaaaattgttattatgtggctgtgaagcaaggtatgtgaaaatacaggaatagcaaacaaaacaaaccacaacatgacattttatgaagtccaaaatccaattggatagcaaccacactgcgagcagtcctatcagttgggtaggtccaaccgacatagaaaaggtctcacatcttacgctggtgttcatatggcaaccgtatattctcgttgcccctcgatggaggctaggaatatactcctattaacccttgatccgaactcaaattcttgagtatggttaggatgattttttttggcattgtctgttttagtgttcagtgatccatcactattttttttttagtgaattatgagagaaggctatttataaacttttcttgacttcaatttttaagccatatgaaactttttgcatgttatcgacgaagctgtgtactcatatacgactctacatgtattgcttccactaaattagtaaattatacttagttgtatttagacaccaaaacgtagggaaaggtcaaatatgtaaatatgcagccctgtgctaaagacaacaatccgtacattacgcccaagggttaatttttttttttcggctgcttatgattattatgtcaacctcaatcgttcatgctaatttttttttttttaataaagatgggcttgaatactgagtcagtctgaaacaagtaattccaactaacttggtatcattaattaggatagaaagaaaatacaaatcaaagaaatatcattaaaaaaaaaaaaagatatacaaaaagtcatggggttaatcaaacctcatgaaaattcaacttatctgttaaaagaatttataattagaaagacttatcttatttatattgtattctgatgtcacaaaaggaagaaatcaatcacaccaatagaaaaaatttaactatagttgcaggagaggtaagaaaaattgtataaatatcgtcttttatgtaaatatgacctatttgaaagttcatgctcaaaattaaggtttttttattccaaaaaataaaataaaaaattaggtttctgttttttttttttctcctcgaaagtaattatcataaaatataataaataaataaataaataacaactatctaagatgtcatgtctttttttgtgttattatgacgtgaattaaaacaaactacatgaaatgtttaatacaattaactttttaattttaatttttataaatacttagttttaagttaaattaaaaattaagcccgtagacctgacatcattttttgttttgattttcacaagaaaacattccacattttattatttacacgagtaaatggtccttctcgtgttacaatgatattagattttgtccttatagttactatttttcattttagtcactatgtgaatgaatttacacttcattttgaatattttttttaaacttttctttgttaacattttggttcgtatacttaacacactttttccatttaatctttataggaaaaatactctaacactattataactagggaaacagtgtctctaaattttttaaatgataatcaaaaaataaaagttaaatacaaataattaaaaacgtgacagaataaacaaaaaactaacaatatagaagtaatgaggagagttactataggttaggaaaaaaatgaaagtttaagaaatggtttaaaactatctaatgaaatgaaaggtggataacaaatggagaatatttaatttattattattatagagtatagataatgttaagaaaagtttgtaatttttttagaattaatagtgtatatattgaccgttcaaagaatttttacacgattgattaattataaactatcatatacgataatttgataattaattaacttttaattattatcttataaatcatataaaaaatgatttctaattgattgatagaataacttttttttacagataatacatatgaattaaacacttattttcatgtgaggattaaaatgtaaattttcatgtcaagactaaaatgaaaaataatattaagtgtgtaaggactaaacttttaatataaccaatatttttattagactctttacatttttttaaatttgattttaaaacacgaaatcataatatagttatgtttgttttgttggcttcttacttgacaaggtgggttttgaatgtgctatgaaattaccatattatatactcctctctctctatataatatgatatttgttaacatgaaaatatataaattcaagcacaaatttataacaacaaaaagaaaagttgtaacaccgtagtccatatgaatgtagaacacaaattgaattaacctgttactaaactaaatcaattatttatgtagatttcgtttaacataaattcattgattacttatttaattgacttcatcactcataagtcataacgaatattgcaacgatgtcacatatacgaacgaatgccaaaaaatttgtattttatcatgattgggccacatcactttacaacatcacaatcgtattttatcatgattgaggcaagatatataacaggccaggtaagtccccccttatggctaattcaagaatcttttttgtcatatattgactattggttatatatactattgaagaaaaatcaagaaatttcacatattaagaaaataaaaatagatcgtatttatggctcgaaaatctacatttgaaaaaatacacaagaataatttataaatgaaatcttaattagcaccaccaaaaacaaaacttgattgtttaaaatcaaattcaacaatacaataaagttgttggagaataaatatgagataaagtccaatatcatgtataagtaaaaataaaatctataaatctaaattttaagattttgaattaaagtatgttatcaaattcattcattatattgatataaatcttttcgatttatccccttctcaacacataagttgcagcatgaatgaaaagtgtactctttcctattttttccgttaattatttatgtatttaacagaataatttacccgtactttgcagtttgcacggtcagcagaacaatctaattttagtgaaaataaaattataaaattcttaaaagaataggagagagggtgcagggtattaaaatcttgatgaatgttatcgtttgttgtctataagaaatgcaacttcaatttattatactattttactgttgttgttacgtcacataacctccaaccatacgttgaaacctgaattggtgattattttctttgttttttccaagtcaatgtttgcattaatttaaactagaattgaatgagaagagggacacgaatgaaatggagatatatatatagaggggttgctgattcgccaacaatacgtttcagaacagatacaatgtccatattggaggttgtggacaacctttcatgtatctaaacacctagcttagtatattcttatgatgacttttttttagtaaattactacattattttggtatagcgttgtcctcttagtttttaaaattattttttaatataagtttatgatattttaagtttttttttttttttttataaatctttaaacttaaccatttactattatttatttgttaatattatcgttacattttttaagttttggactgtaatgtgattgacgaactgcacatttaaaaacttatttaaatttttcttactttcaaagagattaatataatagtgtcaacatttttaattaaaaaacacatcattttttttacagcttaaaaaaacccatcaatgacaaccatcaaactacgttttttctatagtatctcacagtaaaccatgcatatatatgtttcacattttatatatcacttatatattataaggttgagaggtcttatgattattttgtctttttttataagaatttaattaaaatatagtaatagtatatttatttgtttattatctagtcagtgtcatgtatgataatattattttttataataattattttaaaagttatatctaagataatttttaattaataatgttattttttttttgtaccgataacttattaaaactaaactcctttataataaataattatttatattctacttagtgtttatagttattaaacttaaaaaaaaaaatagacgtggaggtctagcaaatccaaattagtgatgttgaatcaacctaatataatgactttaactaaatccagaataaaaacaaatatacttttaaccatttcattttttgtggctaaatgtgactatcgtctatacgttggattagaattatacaaaaaaaaaaaaaaaaaacaaatatacactttgaaaaactatattatattaacaaattaattaggaaaatgctagcagacacaaaaactggttaagaaaataaaatagaaaactttattaaaattatacaaaaaaaaaaaagatcctttctgtttcagataattcttgattttagtaaataaaaaagaacaaatagtaaccaataatctaaaaatattattaaaaattatttaaaaatgtgttgttaatacacccttaacataatttcgaatatattcttaacatgattttaaatgaaaaaatttattattaatttcttacttagtattttaatggcactagtcagaagctctagttaaaagaaaaaacaacaatacgaaaccgtgttggttcatgagtccagatagcgtagcgtgaacgtgaaacacgcgttgcacgtgctacgttgcgtaagcatgctcatgctgctcctcactttaatattgctaaaatttacagcaaattaaagtatgtagatattgaattaaagttgagcaaatcaataatgtattccacatttccgctactaaatgctactccttatcacatcaaggagaaaagtatgtaatgttttatttttaataactctcaatgatgtaactaaaattatgtttgcttggagtataattttcgtataaaatactaaaaaaaatgtcaatgaaatggtttcaggtgctagtataatttttaagataattattataaataataattgtgacaaataataaacctataatatatcatgatttatgtttaaatgataatataattttttttacatataaatcatttactctttaaaattttcaattaaaactaaaaatcggagtgagatgatgcagaccatattggaacacctacaaatcctccccaacttctgagtcaccaatccttaaaatggacgatgcccacaaggccacaacgttcatgacattaatgaggatcgataccatctcatcattttgatatttttttgtacttttttactttgctatatatatagtacatttttttataggtacagtatatttttttacatattattaatattttttttagtactatcatttaaatatataattttgaactttttttttcatttctatgatatatgattgttaattgtttcatcacagaatatcattcttgcgtttgtattattaatgtcttattagaagaaaaagacatatttataaaatggtatattttcatttcaaagatatcattgtgtttgtactattaatgttttattacaagaaaaagacgtgtttaaatggtatattttcatttcaaatatttccttttcacagaaattcatcatatattttacctttgaataatggccgttcagaaaattgaatagcgacaaatttgttagtatatgttaaatccttggtcaattttgaaacattaattgaaagcataatgcacagtttttcgcttccattcacggtatctaaacaaactacactttcagaataatgcccagttctataaaacgataaaatgtatacacactaatgcaactgttttgttggaaataattttcatcttcaactatttttctatggtttatactgttaaaattttgtgattgggaagcttaaaaagcacttcttattccaatttccagcaagcagtatgccaatatgttatatacacacacaaaatataagttgaaattaactttagctacagattaaagagagcagatgacagactaaatagaactaattttatatattaatctcgatcacttggttgttgagtagatttttttttttataatctgattgaatagataatctcgtatatccttgttttgatttttgaaaacgattcactttgtctctgttgaatgtattgataaatcctgtggttaattaggatgtttggtattgttgtgcaagtagagtaagtgtaacggaaaagaaaggtcgaagtctattagtactacgaaatgtgtatttgtcatgcaatttcggcaaatataatgcagcttaggtttaggatcatacggggaacagaaaaaagagatgacaataattgatatatacttgtataaaacaaacatcttgatttgatttatttattatgttaatatgctcaatgaatctcttgggatatgtgtaaacaaagtcacattcttcctatgtgacgtgatttatttatttttgtgtagaagcctttaaagtgtacttttaatctacattattcggtcaccctgtgaacttgcactgacattaattaataacagtgaattttaacatgtgtttaaccaatgccgtaaaataaaaaaaaacatgcgttgaattagattatttttacatcatctagtatcatataaaattggtttatttgttctaaaaaagaataaagaattattttattcctcaatatataaacaattgacaatttaatatatgaaaaataaaaaatcctgatttagttctttaatgtctaaaatgtacgataatgcgtttacccttaatttttgtttatagacataacgaaacatactagaagtgaaaattgttatctttagaatttcaaatagataacatgtttggttttgtggtgaactttcaaaaagcgtgtaaaatatgtgaaaataccaaagcaatgccaatttgcttagcaatcaacatgaaactaattgagttttttttttttctctaactcgttgcaaaatcaaacatgagcagagtcatataattaaatgaaacaagttcattcttgaaatatacaccttacggcccgtgttattgtcactaacaatactaacaccaataatatttacacctaaattcctcaacaaaatgtcttgtttcatttcaaagacaataaaaaaaaaatcatatttctcgtgagcatcaaaagaacacattttttccaaaactagttgtaatcaagatcgaagtccaaagcatttcatattatttagaaatttagttgtttagtaattagattgaatatcaatatctttatcaacttaatttccataatgaatcagaattgagatatactttctcatcaccaggaaataatgatatatatgacatacttgttaattgaacttaatactctcaatataggagtcaacattgctttaacctaaaagtagtcaatatttgcggagtttttatcaaatttggattagtaaactttactaaatcctcaattgaactttctcacttcttcaccaacaaactttctgaaatgttaatatcagcttctccatcgtcgtagttcttaatttttcatcacctaaaattagaatccaattagcaaactctttaacctttgttttatattcaaagttacaaccactataaaatcacgtattttgtactgattttaacactttgtaatatacttccataatttcgaagagttaataattgtcaatacaattttcattttgtttacatttggaataactagcaagatatatttaaaaaattataatcataaaaatcatataattatacttttaatttcagctaatttatagaatattataagatgaataaatttaattctaacctagtataagtacatagtcttaagtttaggatcataatataagcaagcaagtggacaagttataatttagttttaactatagttttggttttctaatttggattatttatttggtcattttttttgaaatatttacaattttagtttcctaaagtttttaaagctaattacgcctcttacttttaaaattgaaaataaagtatttattgattttcttctacaacgaaccatattaatttttctttctaattttttaacaattttttttgggattcataatgaacttgatacatgaaataagactcaggatcaatgacaccgaatatctcacttatacgacttaataattttatgaaaaatacaaaattaaataatctaatcattatattaatttttataaaatatatgaaagtgtaaatatttattttcattcctgaatatgtagagcgttgacaattcgtccctaaaagatgaaaattcaattttttgtcccttaagtagaaaaggtgtgacaaatttattactccattaactttagtccgttatcgttaattgaaagagtctacgtgacacatttaaggacggatttgtcagcgttctacacttttaaggacgaatttatcagttctctacccaaaatataatttaatcttcatatttttccttttttaatcattacaagcataaaattataataaatacttaaaaattaggaaaacaaatataagttaaaacaaacataataataaacataatattgattaataaacataatttgtttattgttctgaaatttctattgtaacaacattaagtaatgacaaaatcaaattctgaaattaatgacataacgactgtgcaatttttatttgagtatcatattttgggtaaagtactctcacaatagaaatttcaaagcaaaaatatgaggtagtaccttatccaaaatatgagattcaaacaaattaaaatgcacaatcattaaattaatccttaaaaaaatgagatccaacttgattttgtcattatctatatctaatgttattacaatagaaattttaaagtaacaaacaaattatacttattaatcaatattatacttattattatgtttgttttaacttacgtttgcttttttaatttataagtgtttattataattttatgtttgtaattattaaaaaaaggagaatatgaaaattaaattatattttgggtaaagagctgacaaatttgtctatgaatcaacattagcggacaaaagttaacggatgattaaatttgtcacacttttttcacttttaaggataaaaatttgaattttcatttttcaggataaatttgtgagcgttctacacatttaaggatataaatgactatttattttatattaaatttataaaaaaaattcatgttaataagaaactagatgatagttcatcgtaataattaaaacaagtgatgataaatgttatagaatttaaaaaaaaaatgctatattgaaaatttgaaatttaaaaaatatcgtagtatgttgaaaggttaaacctgacacgtgtttggtacattccctgtgccatgtaagttggagaggggacagacaggtaattccacaacagtatctgccaccttacttcgtcacttgtctttcggaacctgaaatcacgaaaccaccctccacactttctcaaaataccaaatacgccccttcggtataataagaatcccaaatccgtatctcacaagcgaacgcgaagcagagagagagagagagagagagaagagccaccctttcttacaataaacaacaactcattctttcaaggcttcaacaacagaaactttcatagtttttcactccttctccctgtgtcggtgtgctcttcttctggggcattcgttttttgcttcttcagctccaacttcaaacgcgcttttggtggaagaagcttcactgggatcactatggtgggtgtgtgagagagggattacggattagtgagtttttgtcactaagttagagctatgtcatttcataattgaggggtggtagcagtttggtgttgggattgaaggtggggctttatttggattctgtgtttgttgaaggagctggggtaggtggggcaaatgtgcttgagttttcttttatgccaaaattgaaacttacctttctatgaatttcttctgtttcgtattggtggcttaatttggagtagctgttgcctcagaatgcagcaagatcaaagaaaaaaggtgaatttgttgtttgttctcctcatttccaagcattactctaattaattgctatacaaatcattactttttcaagtttttctctgtcccgaatgaattatgaaggtgccctttttgggactaagctgagtttaaccgaatgaattataaaaataaaatcttgtcttgtttagtgttggtgggttactacttgctaccgagaattttagattacataagtcaaagtgtgggagtgaggttctgctaagttggttccatggggctgtgttatgatgttagttagctctctcctaatgtttaatccatcacgtgacataatttatttcccccacgtgacatttggttgacaagatctttatttttttcaccattttttgggggggtctaatgtgttgatgaaatttgcatgatgcttctttgaactggttagatggcattcctagggttgatcttccatcccaatcaacccacccttttgcttttctttgtttctacgtattctgagatgtgtcttgcacgctttaggtgggttgtacgagattgactctccgaaataaacgttggtgaatgacaaaaaatgatgatttggcgaagaaaaaaaatattcgtcttaaaatgaatattggtttgtcataagaattgtgatgtgttgagtggttttaagtgctgtattttccccttcttttggctttgttaagctggggagtgaagcgttgtatggtgacaatgtgtttctttatgtttattatttgttatttttcttgtgttaatccaatctatgcagacatgatcagattactgcaaatataatttctactctctttctttgattctatgattcttcaatactgagtttcataatgtaaattctattgcacacacaaattttgtgttgtgtgtattaagcttatggatggatcatggattcccagatataaattaatttcccttgtaacatagcaaagaaaaattatttattacttttaatttctatttatcaattatgaaaatttgtttcccaattggtgctttagcttgatttattaacatttgtagacaatcaaatttgggcttgcctgattttcctttgcggattactttaatatctttggtacagggctcaatggaaatggaatttttctccgactatggcaatgtcagcaggtacaaaattcaagaggtcattggaaaaggaagctatggtgttgtttgttcagctatcgacactcatactggcgaaaaagtagcaattaaaaagattcatgatatctttgagcatgtatctgatgctgcacgtattctgcgtgagataaagttgcttagacttcttcgacatcctgatattgttgaaattaagcatgttatgctgcctccttctaggagggactttaaagatatttatgttgtttttgagctcatggagtctgatctgcatcaagtcattaaagccaatgatgacctaacaaaagagcactatcaattttttctttaccagttacttcgagcattgaagtatattcactctggtattcttcaatatttgatagttacttgttcatgaatatcttctttgaatgcgcattgtgttgctagtggctatagcttgttttctctctacaatgacatgtaattgaaattgtgtcattccttagcatttttcttacaaagatgtctggatcatctatatttttttctctaactattgctgttgttgacttttttttgcacctcattcctggatctccttaaacttgtatagtacttttatggttttgccaaaatgttttacttattcatttgtcctttttatattttactttgtctatttatcaacataaggttgctggcatcaatgtcaatattgctcaccaattacatttcaacacattgcagcaaatgtctatcatcgagacttgaagccaaagaatatactggccaatgcaaactgtaaacttaaaatatgtgattttgggttagctagagttgctttcaatgacacaccaacaactgtgttttggacggtattccatcccaacattttctctgtttgtttcataccttttcaacagctttgctagattttttgctccctcatatcaaaagtattggtaacataggggctgatgttttcttgcttacttaatacttttctataggattatgttgctacaaggtggtatagagcaccagaactctgtggatcattttactcaagggtatggctttttcaagattttcagatatcatataagtggtagagaacctaattatgcataatcttgactcacaccatacctaattcatgctcattagttttgtgtgtagaaattgtatatcaacccatgatacatgctttctgttatcttctttcccatcaatagctaaaagtaagacccaagaccaatctgttatttattcttaatccactggttttctgtttgtattagttttattttgtgtctgctgatgagctaacggtaaggtattgactgcagtatactccagcaattgacatttggagtataggttgcatctttgctgaagtattaataggaaagcctcttttccctggaaaacatgttgtccatcagttggatctgatgacagatttgcttggcactccctcgctggatactatatccaaggtagtttctttttttctctctagagggaaaactgtttgtattttcttaactaagttttactaacatcattgtttggctggtttacaatttttattctttgtgttggatgcaggtacgcaatgataaggcacggagatacctaactagtatgaggaaaaaacagcctataccatttgcacaaaaatttcctaatgcagaccctttagcactacgactactggaaaggttgctcgcctttgatccaaaagaccggcctactgctgaagaggtttttatattgttcgctatttcttatgtatgtgtgtgtgtgttgaaacattattctactcagataattaactgcttcttgagcttatgctttttctttggagtttggacaatagaaatgtataattgatgtgcaacaatatgtgaattccttgctttagaattctgaaggatttgacattttcaggcattagctgatccttatttcaagggactttcaaagattgagagggaaccatcctgccagcctattacaaaaatggagtttgaattcgaaaggagaagagtcacaaaggaagaaattggagagttaattttccgtgagattctagagtaccatcctcaactattgaaagactacataaatggaacagagagaactaattttctttacccaaggtttttatttttggtttattgatttatacttcaactgtttatcttcttttcctttaatattttttattcatatgttctaccctattattctctccttacccttcattggtgcatattcttcacagtgctgttgatcagttcaaacagcagtttgctcatctcgaggaaaatagtggtaaaagttgtcctattatgctacttgaaagaaagcatgcatcacttcccaggtaattcactaatgtaggtatctcattgtttcacttgtcattggttgtaatcatgggttgttaacaataggttactttgattatattatatttaagatatctcttcattagatataactggttttttaaaacaataaccggttatatcaaatcataacaggttgtacaaaattggttatggttatggttatggttatgataacaacttgtaatctggttatttagtagttatggttatggttacttgaataaccaaatcatgaacaacactaggcataactcaatcccacaaaactcacttgtaaggtgaggattatccaaacttcataacctatattaacatcatatctctagtcgatactaaataaaccccctcaaagctgcaattaaggcagcccaaagaggttgcaactaaggcacagctcagagaagccgcaattaaggcaggtcaaggatgaccgcaattaaggtgactttccaacagtttttacatagcataatacagtatcaaagtggtgtttacaccttgtagtcaaatgttgagatcttacatcgactagagacgtggatcagtagtagtgaagtctaagggttgcatatacccttcacttcaaacccgctgttgatatttatttgagccatggtttatattgctgctaattactttctatgtgccctttttcttaattcatacctcctgctaacccgagcgagcattcaaatatttgtcctacattcattcgtgaaggtacccctagtggattgaagaccatatcaacgggttttccatcttgcaaataaggcatatcctgtctagacaaattttttgaaacgataccttcatttccatgtctccccgccacttaatctcctactttaatttcacgtttctgtaaaatatatatacgaatcccaccatcctatttatctgctctttgaatgtcttagcatggcatgagatcaaatcgaccaaaataatccacatcttctccaggctgcatttgctgttacaactgtttcattcatagggagcctaatcagattacatcatactgaacttttgtttgtttgctttctcttttttggaatcattgacaggtcaacaattgtacattcaaatatagtaccctcgaaagagcaatcaaacattgcttcctgcataaaccggcaaacaactgaggaaaataataataattccagggatacagaaagtcctgcgccaaggtctattcagggtctgcaaaaatttccacaaggtatgtgactgttatcaattatcatcatgcctttgttaagtttgtatgcattattagtcatcaataagctaacattcttgtgtttagcaaaacctggaaaagttgttgggccagtgattccatacgaatatgcaagtgttgtcaagggtacatatgatccaaggacatttatgagaggttctgttcttccttctcaacctatgccccctacgaatcattatcaaagatcaacctctggaaaacaagaaaggtcagcaacagaagctgacaaggtgtctttacaatcaaaacttgctcagcaatgtggtgtgaatgccaaaatagcaccagacatagctataaatattgacaccaacccttttttcatgacacgagcaggagtgaacaagatagagaaggatgaccgaatagccattgaaacgaagttgctgcagtcaaaggctcatcaatatggtgggattagtaccactgctcatagaaaggttggacctgttcagtatggcatgacaaggttgttctagaagaatgttgtcttgtaaatagtttggccaggtggagccatccttgtggagattaagaaaaggttcttcatagtggagaagtagtagtctctggtggtgctttgtgtaagacgatgacgatgacatgagttagtgcttccccagaaagagccagctttctctggtcaaaccttgtaaacattggtttcagttatcaataaactgtacaaccgaatttgagtcctatcttgtaattcaatccacacattcctttgctcaggatatatatatatatattttttttaaatttcctgcaataactattttccaagtagaaataaataaatcagaccggtacatgtactactatacgagtaaaaatgtggaaaatgtaaagtgttttatgcgtgttatacacactggacgcaaaggagtttcattgtttaaccatagtgttttaaccccctttggccattatagaaacagattcctcacacgtttctttaacaactggattccatttaaaattatatcaaatggttcaaatgctaccaaattttcctcacctaggcacagtaacaatttatccttgaaagtaggtttggtgcttgcataatttccttctatttatgttttttttttttttttgaaagaagaaaaatagacacctcattgttttattggaatcaaacctcaaacaaatagtttgagcattggatcgaatacgacatcacagtatttcatatgattttgaaaatttgaacggacatgtgcccaccttctcccctcatggagccacattggccttccatgtggaggaagttactgcagctaccttttggaagctctatctaatacctagctatacaggataagattaactttatgtggaggcttgctttcagaatgtacaaccacttgtaagttgtaactcttgcttttttctacttcttacttcagaatagttaaaatgctaatggtggaatgtgtgatgcaaagagacttgtttaggttgttactaatctatcagaaaacctggtggaacagtcttgtcagaataatgttgcattgcaatttgcagcccacataatagaattgaagataataaaaaaaaggaggaaaaaaagagccactagatgcttggctctaaaatgtactgtaacattgtttgttgatttacattaatcattaatttaatgtcgtacattaaaaacattaaaagaatgacctagaaaatgaggtaaatccgaaattgagataatgcatttgaatgatctggtcgcttgtttattgtttggcatttaatgcatatgtaagctgcagaacacgcggggctcaccaataaaagtctgagtcagttcatgtgctgatcattaagttattatcaggttgagaaaaattctcattcctccctctctacaagaccaactgtgaatattcctcaccagctgcatgcatttatttttccttttcccttttctaaacctaattgctgatattgttgcaataagttttgctccagtgattttttttttttccatttacctacgcatcctaaaaatggatgctaaaacttccctttccttgtttgaacctttgtggtgccatcatgcatgcctagttcatttatattcatagaattttctttaattaaagatgattaattcaatgtttggttatcatcattcacaatatgcttaaataagtcaaatgttatcagcatgggttaggtctatagagaaggattagtatcttataatgtgacgaatcaaagtttaagttttcatgtttactatctgaccaacgattctttaagtaagattgtttctaacaaaaataaatgtgattagagaaaagttaagtgttatttaatattcatgattaaacatgttaaacatttattatgtgtattctttttttatgttttatatatctatgtcctcgtgacctactaggaggggaaataatggaaacatgccaataggtatatccctagaggcctaccatgtgagagcttcatttgtttgcaccgtaagatgattttggagatgttaataagtccaaaggtctgttaaaagattgtgaacagaaacaaaactcaggtaggatgtcgacacagttgcagttagattagatgtatgagattgaattataatagctctctcatcaatgatatatgtgccaagcaaagcaaggcccctatgtaacaaattgatttcaattttcgtacaagaaatggtggtacggaccccattaccctccagaacaaaattaaaaaaaggaaaaagaattacgaaggattgaaaaaaaagggtagtgtagtgtgtgaatgtgacaagaacagagggatccgagtgggtctgagcacatggagtcccatatgcccaacacaaccaaatctctcatacaatcccaatgacccaatccgccgattggtttccttcttggaaacaccaccacctcccctctctcattctccaccacactcactaattacgctcaccatcaccaaagctgcaacccaaatcactaccaaattaacaaacatatatatatatatatatatatatatatatatatatatatatgcatcaatcatcttttcactctctttatgagtatcatcacacttacaacaccatctactttgtcaaatttttaatctaccatttttatcttataatgttgtgtataatttattcttaccagtatttcttaatgaattgaatgcttatataatgatattataaaataattttataatttcatataatgatatattattatttaaattactttcagataattattttaaagttaataaatttattatatattataaattatgattgaattattgtgtaaatatttttacattttcaatgtataaccgtttacctgtttcttaattatataacttaaatataaataataaacggctataaaaaaattgtattctttctttctctctctctctctctctctctctcattttggtgaaaaatagttagtataatttactttcttacaaatatctcaagctttcatcacgttcaattttttcgtccttttatttatgtgttttttttaatttttactcacgatcaataatttttgtttttaagaacatgttcttaacacacatcctctttaattattataaaattattaaaaactataaaattagaaaaataataattaaatatagtatgagactcacaaaatctaaatatttttaataaattttaattaattaaaaaaagtgttcaaaagaatgtaataaagaacgtctttctatttttgtgtgttctgttaaatttattatctgtgcaacatttttttttattgaaaaccattcaaggcagttgatacctttcatttcagattattgaattttttttacaggcatttattattgtggatacgacataataaatcatttaataaacatattgtagtcatgtttctctttaattaagggagtggcgtattttgatacgaaaaagccacttaaatgcgaacttaacttctttatccagaaaaccaacttgtcctaaataagctaagcaaggagtatttgatttccttaaaatcccaagttgttagttgaatagggttgggattgatatgattctagcaatttacatgattaatttggcctaaaagggttagaagggggggggttttgtggggctcaaggtggggtcattggaaagtaaacacgtggcagtcatgcgaagggtagtgatggagatcacatggcatatgaatgaaagagaagagagtggagaggcacatgggtgggtgttaagttcaaggaattcatgtgagcacatgtgctttctcccctttcttttgtgttctgtgggaccattttttatgctccttaacggggttgcattttgcagtcacttctaaactttatactttcacctttacccctctctccaaaatcctcttttgaatcttactacttaagaatccttaaaatctaatgcccatacatattttatacactattaacaagatgcatgtgtttagcatgctataattgatcataaatatccctttagtgcatctaagatgccactttcctgtgatcttgcaacaccctctaaaatctatggaaatactaattgtttgattccttaaaaaaaattagtttaacatatttttatcaataattattagaaaactatgatatttttatcccaacctccaaggaaggaaataataagcaatgaaaaggtaacataatactttaattttattataaaatttttatactataaccttattaaaaacatttttaatataacttctaaaataattattataaagataaaatttagatacaaatctataagtgttatttgctttttttataatcaaaattaaagtttcacttctataattcttgtaacaaaggattatgcattagatttagatgcgggttcgtttaagtttttctttcggtaaatcaaagtaatatttaataaaattctttattatgcacattatcgaaattaaactctaagttgataaaaaaaaaacaacatcaacagtatttatgatattgcatttagattttgtttattataaagacaaaatcattataaattttgaatttattataaaaataaacaaatttatcatataaaactattcgtgacaagataagaaagtagaaaaataacttgacaaagataaacaaatttagaagggggagggtaaaaaaattgatgaggggtgttgatgtggagcgtgaaggccacctcatcgctccaatccaaaacttggggacttcttcttcttcttcttctttgtgttgtgaggccaaaaccagtgggaccagcttcgttggcattgacatttctagagctcaacaataatttaacatcttcctccttccctccctccttcgcacacaagacaatcacacctcatataactccctcacacattaatctcccttctctctctctctctctctcacacacacacacacacacacacacacatcaaattagtactacaactacatgtcatcaccatcatccatggaacaagaagataacactatcatacccacattcctcagaaaacctgcagaagatcagaacaacgacaactctcccaccccttctcacaagtctttgcatgttttccgccgcagcaggaggcggtggaggaaggaagtggcagtgaaagatgctgtgaaagaagaagatgaagaaaaagaagaaggagaagatgagggtgatgacagagaagatatagagaggaagattcatgcattacagaggattgtgcctggtggtgagtctttaggtgtggacaagctctttgatgaaactgctggctatattcttgctttgcagtaccaagtcaaagccttgagggctctcactggtttctttgaaaagttggagaaggagaagacaaagtttggaggttgatggtgaacatcaacatgagatgatgaatgaatgaatgaataatccatggtgatgatgatggattatggaagcaagcaagcagcttaggttaggtccttttggtttttcccacagaccccattagttagaatttttatttttcttcttttaatttttatgttttactttgatgtacttttggaagttgggatcaaggagaatgtttatcccatgatcgatgttcttagatttttaattttttaattttttattttgaagttctcatcagctctttctttctttttcacagtgttattttttttccatgactttatctatatatcttcttgaaagttgatatattcatacgccgcagattaatgttacagaaggagttattgactttaggcaactgttgtaggaatcttattaacctgtttcatgatctggagtggagtaaagttagagtagatgcaagtgtatgacacattatggtgtggcttcgatgtacgtgggctgtgacagggttcatttttagttcatcttggtccagtgggccacccctattgggtcatgaaatctggatgagatcagacgttttataaagtaacatggcacatacacatgttgtcattggtcactttctttcttattttgttgtgaaaactttgctttggagattttggaatagggttgtttgacttttttggcagttagccattactaccacgataacttagacttagaatgcggtttacagaaagaaaaaagacagcacctctcccacttgaagggttgtaaatttcacatggcttctttctcatccgaggataacatgatcttccataatttaaggtaaaaaggaacacattggcgatgatagtgttagccgaatcattgtacagccattaatttgttggagatgcatcactcttaaccttcttgattcttaccctgtgcatgtatttcaaagatggaacatagcttacaaataacaacaagagtcactaactttaatatgtttgcttgcatttttagtggtaggaaaagcagctcactttctttcaaagttaacaatcactgcttaaaaaagaaaaaaatgtattcaatcagtaaaattgatacaacacaaaaagttgtttcctctaattttagaatatattgtacatatatagtatcatatataatgtcaaaatttctatgtttaaatacataaattttattaaaaatgaaagaaatgcatgtaaaaaattgtgggcatagtaataaatactacctttaatcttattcatacgaaataagtgataatataaaatatattatcacttatttttcataaataggactgaagatataatgagataaaaccaagactctcatgactactattacaccgatgaaatgaccatttagggatatttttttagttaattatcatttggaggtttgttttgaattattatcaaaaaatgaataagttgtaacattttttatgacttttgaattgaaagttgtaatcgatattatgacttctattttttttttaatacgactttaaagtcgaaggaataaatttttttaagtcataaaatattgtacaactttaattaaaaaaaatagaaatagtaatatcgtatgtggctttgaattcaaaagtcgtaataaatgttacaacttattcatttttcgataataattcaaaataaatctccaatattatttaactaaaaaaaaacctaaataatcgttttgacctactacagcaaaggcactcccactacagtcactattttggagatccaacaaaacaccacactctggcaatcaaattccagcatgcttttgctgaaacaacccatctgcattctccaattgcaaacatcctggaacagtcacagtcacaatcacagccccagccaccacaattttttgagaccgaatcataaaaaagcttatcacgtaggcagaaattaacttgggcgtgtgacattgtgaacaacaacaatatgtatccatcatagcacataaagcatgcatgcagcatcaacattcaacattgacaacatgtatgagttatctaacttctaggtggctgactattactgatctacataaccaccaaatttatctccaaagagtgcatatatatataataacctccaccagtattgtaacgccacattcactgatgaaacaacattataaagctttgctcatgtacaattcaaaggaattggcaggcaggggagaaatttacacacatctcttcttatatgatgttagtgccacttcatcgacagagtagacttgtaataccaaaatcatgttaacggtaatttttaattaaataataatataaaaaattttatattatcaatatatcaattactaacacattcttatgtaattttgtatttaaaaattaaatttgattataaaatataataaacttaagcattaattatttatgctttaaatacaaacagtactcctgttgaatgtatagaaaaattatcaggtaaaaaataataattaaaagagaaacattaattttttaaaaatcaagtgatacatcattttaagtttttaacaaaaatgatggagaatgaggttaaaaaacaagacaaataatttttgttttggttacggctgaagcccccattttttttaataaaaaatcttacgtgataggttgcaataaatataaaaccattccttggatgcactcaatatatgttggataacctgcagtggatactcgagacctcttgggttggggatgaaatagtcgcagaagtagaggaataagtccaatttatatttactattttatattagaattagttttcttatatggcataaatatttataaattcaaatacaatacaagtaaaaatctaaaaaatatttaaaatgatataaataatatttattaaaattaaaaaattaactaaaaaatttccatttattagcacacaaaaatttcaaacgttagaattactcctgtatatagttattattgtctttttttttttaatttcgtaatatagttattctcgaacaaaaatttaaccgtttgaacaaatattgcaagtctatattaatatatagtaagatgtattaaaaagaaaatactacaagaaaataagaaaagatcacataaattgatttatcgtagttacctcatacttacttacacctacaatcttgttacatgatctctagacaaaacttaaactctcccttcaaatgtttgtggccctttctccacttagagtggtgtctcagctccctcttaaggtttagtggattttttttttttttttatctcaataactcctattagatatgagaaaattttcttctcttaaatagttaaatttctttagaattttttttactctcatgtcttaatgtgactctatagtatattgattgatatagttcttagtgatttttattattgtcttttgaaatagaattctatagttcttagtattgagtataactatcatttactactttggtcccgttgaaataatttgtcaaactctgtcattgatcacatttcttctcttctggccaccaccttcacctaacctttctcccattctttttctagccatcactttcatctcctttattttttactttaggctttgtttgggagttaggaggggaaggaaaggaaagagattcaagaggaagggaggggaaggaaaaagaggaaaatgagggaagttcattcctccttgtttgggagttaaaaatatattaagagagggaaattgagagttaataagatattaaatatgaaaattatataatttaaatgtaaaaatatattttaatatattttgaaatttgtagttggggtataataataattttaattacttttccttctaaaaaccccccaaattgggggaacaacaatttttaagctttggaggattttggaggagttttaaaaatcctcaaatccttttcctcaaaaattaaaactctcaaacaaggagatgacacaatctaaacctttcccttccctccctttccctccaaaatctctctcccaaacaaagccttatgtgtttctctatgtaaccttctcttttgactctatttttcccccatcacatttcttcctttcaactaaacttgttactaccatcttttgcaattgtatccaaactaaagttacttaggcaacacttccctactcaaatttgttgttttttgaggtcttctacagaacactactttaatcaggttagttatgacttattttgggccaactcagtttgaattgttgttggacaagtgtcgttatataagaaataacaaaacaaaagaaataagcgtagaaaatcttagactctattaaggtttgtttgtaatgggaggatgtgattatcatgcatgttttattgtgttcatagtttactaatatgtttatctattgagctttgagcgtgtttgatttgctaacgtatatttgttgtacacttctttagcatcctatatatactcttgtaagtgtctttggacattttcaactaatgatcatttgggggaaaaaaaaaaaaaagaaaaagcagtggctattgtgagttgcatgtcatttgtccctttgtaagctaacctttaacaagtatttgaacttaaaagagggttcaaggcgctaatcttgttacaaatattagttgagagatattggcaaagaaatgcaaatttcaatctctaaattgatacaattaatctacccaaatgattttaggcatgctttaccttcttaccttatgggtggtgattgttattgtattatgtttaagaaacatgtgtggttgattgcccaagttattaacaatctctatcgagttaagtttgcatatattgcatgattgataattgttactttgttttgtatgtctatttatatcatgatattttaaaatgtgagatattgtgtatgctattagtataataatatatgaagtaattaataatttgatttcttcctctttatatatatataattatatgattttcttttaatgattcccttgtatgttttctttttgtttgactgttttaacgagcttaatcttgtattctttaaagatatactattatgtagaaatcaaattgaggtcattctctacaatctcaaggtgcacccattataagttgtttttagttttatttatttattattgattattgattgatacatgacatatataaaaaaatggtgtaacattcttatgctaaatatctgtgttggaatttggaagtgttttcaaatccgaacataaaaaatgaaaatggaattacccgatcgaatttgacatgctggcgtctggcgcacacatcacggagaacataatttcaaatctgaaccgtcggttgattctgatcgcactttctgagcacttccttttgtgaaggaaaaggtcaaaacgaaaatggtaaagttttcaagatatttttgacgcacactacaccactcaaaaccctagttacacccatttcataaaactttgtcactttcccggaaaatcctccccatttttcctggaaaatttatcttccgttttctcgctgacacaaccgcacactcttcacaccttctctcactctgtactatccttaccttactcttgctctttgcttttgcttcataagaatgtacctcaacaattatttattcatttttttttttgtttacttccgtgtataatttgattcacggaccgttaatcagctacttcgagcttataattacaatccattttcattttttgtttattttattttccgcggtgcaattcgatttcgatttctggcttaattaaccgctttcggtgtttgcgttttttcgttgtttggcagaatcaaccatggcggacgaaggtgttgccaacggcggcggcgttgacgatcagtacggcgaggaatcggcgactaagatcgtggcgttgcaacgcgagcgcgacgaattggtgagcgaaaacgtggcgaggaaggaggagatcaagaagctgacggcggagctcgacggattgaggagcgacggtgcagataaaagcgagaagatcgaagagctgcagagagaagtggcacagtcgcgtgatgctgcgaaagcgacggaggttatcgccgcgagggcggcggacctggagacggaggtggcgaggctgcaccacgatatggtatcagaaatgactgcggcggaggaggcgagggcggatgccgccgaattgaggaaggttttgggggagaaagagtctagggttgagtctctggaaaaggaattggcaggattgaagaaggtgaaggctgagagtgaggttagggttagggatttggagaggaaaattggagttttggagactaaggaaattgaggaaaggaacaagaggattagatttgaggaggagatcagggataagattgatgaaaaggagagggaaattaagggttacagacagaaggttgaggaattggagaaggttgctgcagagaaaaaaactgaattggatgagtcggttaagcataaattgaggttggaggaggcacttagagaatctgaggagaaagtgactggtctggaattgagtattcttcaattgcgcaaggaagcaaaggaagctgagagggtgatcatatcgctgaatgagaaggcggtggagaccgttgagtcaatcgatagaggtttaaacagtgtacacggtgaagggaagggattgaagttgcagtggccagtggtggcagcagggtctacaggagctattgttgcagctgctgctgtaatctacgtgtgctatggaaaacggaggtgattttctgtctcatcggagagtgatcaaggagcgaggggattttgaactggaggaggttctagaggttagacttaccaggtctttagtagtcatagctatgctgctgcaattttgtttgttacaaaataatgcttcttctctggcttttgtttttgaagcctgttaattttttgctcatgtcgaagttggcatacttcttttttggttgttagttgcttattatgaggatcaaaccattgtgtgttggatttaataaataggttgcaaaattgagatgacttgtttctttgtgtttagtttgacccttgttagcttggaggataaacaatggcactgctgttagtttaaggcggcacttggtatcacctcttgtcaagctattctgtttctaaagttgatttctgcatccatgttcattttcacagcatggctttgaatatagaacccacctgctgaattaattgatgtttcaggattagatgatatcactgatttattgttgttgttattgactttttgtcttgcaatgtggtcagagagagatgttttttcgggtcttgttcattttttcttcccatgcttatatcccatctgtcgtaattgtattcagaagaatttgtatttggttgaattttttttcagttgtagttgtaggtggtgggtttggagtttgaaagcgttggcttgcattgcatccctttctttccaccttttaatagtttctgttaagttgactagtactattaaccttttgctttaatttaaatagacacaagggtctatttcgtgaatttgaagatcaattgtcaaacaagtagtgtcgattgctatgctaacgttggatagttactattactaagctattgctgacataacttgatagatactaagctattgtttaactgcttaggaggcgaaatttcgtgaagctgtagcatttttgttggaatttttctttcttttcttcagtgaggcacaaagaattttttgtggttttccaacttcaatttttattatcatcgaatccacttaatgcgttaatgttgtttatacgcgaagaaagtctgtttatataaaatccccttaatctttaatttgattctgatgtgtaaaaatctcaactatggtacaatattggaagaacccggcgcgagctgcaatcctttatgattccctgccctataaaaatgaacaccaaattcaacaaaatgatttattatcggttagaaaaatagttcctgctttaaagagcttacgttttatcttgtttaaaattaaaggtgaaggctcaatcaagtaataactggcttaaacttttttgttactacataataacttgcttaaatataaaatgaaattgatttttttcaaggcgaactaaaaagtcaatttcccaaaagaataaaaaaagaaaaattagcatctaagttgcatgatattcaggtagaaatagcttttgccgagcacacatatagtatggcatctattttgtatggtcattactcattaccagtgtcacttttataaaatcagagtgcatcagctttcatttaaaaataaattatccttaattttcagctttggatttgtaagactgtgtggtaagcataaagcgttgtagctacgcagtgtcagcctttaatttttgggcccaacacctggcaaggatagatcttatcaggaagagaacctttcacttgcacttcgtttagatggctgacaatagggaagaaaataaagagagaaacaagataaaattttcaattttgttgtttattggagaggagaaatagatagatttttctaagcatttcacacactaaaaacttatagtgtttaagcatatcatttgacagctaattttactaataatttttaattcaataatagcataacaatcagttaaaagtttctagctataaaaattaatttttcaacatctaactaattaactatttgaccaaatttaatagcaaagtttgttacaacttcaaagctattacagtatgggctatgttccatttctaaagctatgatcaaaccttataggttatatttttgttgtgtatctagttgagatacataacggaaatatgcttccattacatatgccattaaaaaaaaacttaccctaaagctcgagtgaaagggataggaagtggggaatggagaagaaggacaagtgtgacagaattgtgcaagagcaaaagagtttgagaaggagaggaatgaggtgttgggaagtaggggaaagaagtttaaaagagtttaggttatggagggattaaagagaataaaacatgagaaagtaaaaaagtcatgaataacgtaattttatgtattttaataatttttttttaattttttttaaccaataccctaaaatactattagtgtttataaaaaaggagttaagaataacaatttctacaagtatttgtgtttcttagatagtcatgctccaaacattcccttcctctctcaaccatcattaatggaatgtgctgatcgtcaaccaaacatgggacagcttaaatcatcctttgaatgtatcatttcaaagcaatggccctttttctttggtttttgtagttcatttgtttagcccttggcctttatgataaaagacatttttttttttttgataaactatgataaaaggcatttctatctctatacagaagaagaatgaaatgacacatgagcttacttcgtatagatcataataacgtggtgaatgtaaaataacttttgataataaattctagttcatggaagtttacaatatgccacaactaaaatgtaccataccatacattttgtcatttttgaaatgaaacaatgtaaccactctgattctgaaacgaagcaggaaagcaaccagaacatgccccttaatttgaggctcaatgaatgcacgcaggaaagattttgtctgaaagggcaccctcacagcctatgattatgcaatgcctcagtaaccttagctcaaggttcaaccttctacgatgctctgccctataatattaaaaaatcaaataacgattcacaacttagaaaattgccccaaagcaaagctaattaattttgacagatgatcagattcttaaatttgactgttgataatcttcaggtcaagaagatcgaatcagttttactacaagtgttttcttaaagacaaatgctaaagtactgtattaaggacattagttaagtaatttaaaataattttttttattaaaaatgaaaaattatgttatttatatatttttttatgtttttctattatttatataataaataatttcttattttaatttttaaccaatattttaatagatcctttcttaaaatatcatctcagtatttagaaatttgacatgacttgggcttttgactcttgaggagcatcagtgattataacgcatatatcaatatcccttgaaattattgttgaaatcaataaaccacattactacaatgctgccaaattgcacctaaagtactattgaatttgtctgtggtcactaaagatttcagaaccgaagtcttggccaaataaaaatatatgtttaattactacgtagtatcggtataaaattattaattaatcataaattattattaatgtaatattttaaaaattattataaaattaataaattattatatatgatgatttgtaattgaataatagtataaaattattttagagtttccaccctcaatgcattcagtcaaaagttataagttataagtgataaccaccaatgtaaccatattgacataaaatgcatgctagattgtattcatcaccattcatcagtaagcatgataaaatttcaggcaaatattttcaattcttttcttgtttagaggagttactttcattactaatatgtcggtaattgatacacagttggactcgtacttctgttcaacactgacaattgaggctgcttcgcatcaagtttttatttgcatagcagcttatcattctccttgcaatgtccaaataatttgaaaagccactaattaacgtcatattttgcagctaaggtaatcaaaacaattttctgatacttaaatcgaagcaattttaacccttgttttaccgacagtttgaaagggagttgtaaaattttgtttgagaaagcacaacagctctaaagcgttgttatttccatatcatactttttttttgtttcaaacttaacaagacaaaaagcaataaaaagattctgatgccaactagactattctctttagtgggttacgcaaagtcttaaaataaggaaaatgtataatttgtatgcccagggtctccaagtcaaaccgtgaaatatttccattaggtttagatgttattatagtgacacttaatactacttcagacccaaataatatcctatcataattaagctatataccatttgtacaaagaaaataagtcactttcatgagctgaattaagtttcatattagccctttcaaatatttgattaatcagttatttatcatttattattggtcaaagaaagaataatccttggttgaggtttactcaccttgacttatctatcaccaccactcataatctcaaagagtccgcagcaactcttccaagaggtgttttccctttgagccacaggaacaatggtctgtcacaacaaaaagagtatgatcactacatccataaatgcatataaaattacaaaggcaaaccttacaaccaacacttgcttagcacaaactgaaatgtctatatgaaactatcataaagtgtgaatcacccaccggattttcagtgctttcagcatcaggaacacttggtgatggttgaaaagactccttggcactttcataggatgactcttcttggccacctgatggttcctcaattttctcatccaatgttggctcaaaatccaatgatttctcaattatggttggagcaacctggtcactctcatctgattttagaacacttgtctccacagtttcctctgaagtcacatcagttagaggcaaagaagaatcaccgtagacttcatttggttcctcactctctctaagcaacttatctgtcacaactgaagacaaaacattcttctcctctccaccaaacatcatgtgcttaaatgtttcaaccacaacttcggtttctctctgtccctcatttcctgaaactgaaaagagctcattatttctctctgaagaaggcaaatccgtttccttcacctcatcattaaccacagctaggtcagatagaaaatctttcccttcctcttccttcaatttcaactctattgtatctgattccattgtattctcaacttgaccatctttcacagcatcaggctcaaaagtctcacaaactgattcagaatcttgtgtcacttcaactttgcctgagtcaaccagctccttattctcctcatttggtggtgcctcttcatcagtgatggaaatatcaccaacttgggaatcatcaacttcaacaaccacctccttatcttctctcgaattttgtgtttctactttgtggctgtcttgtaatgttccattgagagatccttccattttcttgcagtggtttgctgaaacagctgcccctgcaggtaaaaagaatgaccctatattattctcttcaactatcacaaaataacaaacataataaccttggcaaatgggtgccaaactgccaatgaaccttattctaaaccagttttgtgttaatagttattgaatgaaaaacaagaaaattaacaaaaataagattaaggaaagtaacaataagaaacataggatacccaacaaggatgtacaaagaacagatggacataaagataaagaggacacgcaacaaaatgtaggtggctggggaaggtagatagagagtgtagtaaagagtgattaccttggagttgatcagagtgagaagaatggtggttgagaatggtcacagttttgtgtttcttggcttgttttggtttccttcttgaagctggaggcatggacgctgactggttgttccagagaatggtggatgaagattggtgttggtgtcaatgccaatggttatagacttatagcagtgtgtgcgtcagtatgtgacttccctttctttctttttctgcttcttctgtttacttatataaagaataagtgcttttaaattgaattgaaacgctcatggagggaactcaagtgatgatgaaacgttaaaaacagttccatctcaacttgaagtatattctgagtgtgcgtgtaacgatgtgtactatgtttggagtacaattttcatctaaagtaaaattccttcaagttgttttaaataaggtgatatatggattgttttgttaccttaaaattttaatttttaagagagtattagtacctttgtgtaccaataaaaaaataatattaaaatcacatcagaaattaattagcatttaatttcaatggtgttttaaattttataactacacatattttcaaaattttaaaatattaaacatgaaaaatgtactactgtaaatggaatgggcaacaaagtaattcaaggcccgtttaacaattacaaaatatcaagatactaaacaataagtcatattatcaattccatattacctataggtaaaagttacaagtacaaattaatgtctattatttattggtctattcaaggtatcaatatccttcaatatatgtaaacaccataaaattttccttaatttttttgttgtgattttccaaaatttattagatggtttaatttgttgtcttcggagtgaaacgttgcaaataaaaaatgcattgaaaatacgtgagaggtacgttttaaaatcagcaaaaaaaagctgtaatttataaagggttttttaagcaacaagcataaaaacaatcttattaaaatgtaccattttagtacttgtaaaaacaatataattttttgtatattatctgcaattatgaaatgtcatgtataaaaaacctcttgggcaagtggctaataataagtatctttttactattatattattagagttttatcaaaaagccactctctagggacgcataaattagttgaaagagttgaaagagaacattgttttaggaggaatgatatctgttggtgatataaaatatatatagattttgtcagtaattaatcttggtcaaaaaatttgattaatattcttgagtaagatatttttctctaaccacaagactaataagtgtataatctaaatatgcacactctataactacaaacaacactcattttaatagtttttaaattctatttatctccttatcctgttagatatacatttatttctttatctattgagctgtcaaatatggcaattgttcaacctaacaaaagaagtcgaagactgggatagaaggaccatgctgaattggtggtctttatgggccgatggttagcacctcctgtcggtgcttttcatcccattttaaaaaatgtttgataaaaatccataatgctatcttacacttagatgcagagttgaaaaagaaaaagaaattatatatataatagaatttatgacatgatagaaagaaatgaaaaatattggtgaaatatttaaaatggattatgtatgtgtatcattattctatctattgaaagatattcaaagctaatcttctatttttttttttatagttgaggtgaacaaatataaagatcttctaactctatcgaaattgattttttttaagtgggtattaccttttatatgcactcaaaacgatcattgacatgcgtaattaaggttaattacataaaccatattaaaaatgtatttaactttttaacagtagatgtcaatggttgattgagaaaaactacgtacatatttctggatttaatagaatgaaatattttcactgaacatttatacttttctaaaataataaaaaaattcttcagtgtacattataatcatgcatgcatggtttgcccatgaacataatgatcaagcaatcctttaatgggaagtcacaagtgtttattctttcggcaatcctgtggaaaaccatgagcaaaacgtatgaaatcgcggcaatagtcgtaaacaacgaatcttgaatggatctctttgaggtgcttcctgatttgagcatcaagacctttgtttcttccaccattgaaacccatgcaagatgaggtccctggtccagcaatgcatgcattcgcattgaaatttctgaaacctgctatgaatggagctttagaccaatcaatcttaaccttgccccctcttgttgcccaaaagtctccattccataaagttgcataaatcttcattcgttgacttgtggggaatggaacaccgatgctctccctgttgtgcatcactctgatgggtgtgttatccaccaagattctacaaacacacaaaaaagaaaaacacacatttatgctatattgtacccataagtagaattatacaaatttattttgttccttacactattgaatgagttgtaatttcacaagcaatctaaaaggttttttaactgtcattcaagtataaacattatatatttatttatggtaaatttattaaattttataataattatcgagtaatattaacaatgatttttgattgattgatagaataaaagtttttttacatatacaacatgtatctccagaaaaattattaagtatgtggttctagatcattatgttttcaattaatttttacattatatgtatattaagtgttataaattaaataacttaaatacatgttacatataaattaagattggcaccataaacaggtctgctaataattttttgcatcttgatatttaattagttctatgactaggccatattaatgaattggacgtctatgtataaaaaaagctttataacgacgagtgcatataaattaaattcttaattttatgcataaatttattttgtacttacattatgcgctgagtgttccaatcaatggaataggtgtggaagtcctgtgtaggatcaaaccaaagatagaactgcatctcacgacccccagtaccgttggcataataattggttgagagaatgtatggatcaccagataagttgcccaagaactctaaatcaatctcatcatggtttggcccttgagagcttagctgcatatatatatatatatatatatatatatatgaaaaagtaatatgcatgaatattatgcaatatattatgtagtatatgtgtatgttgtaatgtgtttacgtgtgtgtgcatgcatggatgggagagaataagcaagtgaatgatgggttaacttggaacaagttagtcatacataaaatgtagtgacagtgcctgcagaatttcctggtataagcttgatttgcatgtcaaattgtccaaacaagtactccttcttggttgctatgcccgagccagaagatttgtccattgcaagggacatgcttgagcctccatcttgtatgttagctcgattatctccaaagagaatgttaaaatcagtgttgaaattcccacccaaagcaattgttgttgaggctaagaagttgagagaaagcatgaataaaacatatgaagaagccatgttaatttgattatctgaaaaaatatgaatccactaaggtatttaaagtgatgttgcattcacgaattgagatgataacagtaaaatgcagtggattcatatcaatttagctgtcaaaggtggttgtggtaactgcctcaagcgcaatattgctgtcacaattacaggtcaaaatctggaagaaccgaagaaaatgttttttaatcacaaaattaaagttctgattggaggagaattggttttgatgcatagatatgtgtggacaaaattttaagttgaacacaagtcaaagcccaaaataagttaacactaaaaaatgtagtctatatatgggctggaccttgaagaaaaaaagaaaaataatttggtgtttgcttcctacaccagtcaaaatgcttatacacccagcaggtatttgtgaaataccacaaatagccttgcttaaaataataaaacaaaagcatttttcaaatttctaatacaccaatccattcgtattcattcgtattcggcgcttcttctccttctccttgggttctctgtgcttccggcgattttggtcgttgccaagttgtgattctcctctctccggctgtggaaggtggttgttggttgtcggcgacgaagggcttcctgttttccggcgctttgaggtaagtaaccgtttcgcttttcgttgtcttgcaagcgtacagattgataatccgtgtgctgtggaatgcacggattatggatccgtaagaaggaatggcttgttgttttgtcttgcatgcgtacggattgagaatccgtatcaagtggaatgtacggattatggatccgtaagaaggattggaatccgcaggccttacgaattgccaatccgtatgccttacggattgtcaatccgtatgccttacggattgccaatccgtatgggtatttggttaatttttgatttttttaaatttgaagattaagtgtgatggctcaagaattttttgcatgaatgaactgaactgatttaatgaattggtatgttaaaagcatgttgtgtaaaccatgtagtcaaaattgttatgtgaaatgtgatgagcataatgctatggacttggcagaatggttttgatcctccacatgcctatggtttcatgatctacatttggtaggtaatttgaaatgtcatgagcaaaatgatagccacaatgaattgttatgtgaaaaccatgtagtgaaaattgttgtgtgaaatgtcatgcgcataatggtatggatttactagattgtttttgatcgtccacatggctatggtttcatgatccacactttctacataatttgaattgttatgagtaaagtgaactgttatttgaaaataatgttgtgtaatggtatggacctggtatttggtttctgatccacatgggtatgtttgataggtatcgttatctgaaagttttattttgatgaagaaggctatgattgtaatgtaattacttggtttcaatgtcagattatggctaatactataggattacggcgggctttggcaagagatgccagtgaagaagaacccgctgtacggcgaagaccaacagcattagcacggagacaacgccagaggactgatgttgttgaggacgtgcctgctgaggtagccgctgacgatgttgagcatagtgcacctgttgaggctgaggtggagggaagcatcgatgcctctgatgttgacggattttcggtgggcccgatgacagtttagtgttaactcattatgctgagcatattgcacctaggatttggaggggagaggtatgattgtatttaaacatagttcaatttgataattgttttcgcgttagggtatgtgtatgtaactaaccactaatacaggaacggcccgagctgaagttggcatcccatgggaggaaggttcagaagtttggccggcctgcgcctgagattgaagggttggtggcaggtacatgattaagcccattgatcacctgttcggtagatacaggtgaccggggtttaatctcggcatttgtagagaggtgacataaggagactagtagtttccatttgcccatcggagagatgaccatcaccctggacgacgtcgcatctctctttcatctaccagtcatgggtgcgttgcagacatacgcccctttggatgttgatgaggccattgcattgcttgtggagttgcttgaggttacccacgaccaggctgcagcagagacgaaacagtgccatggagcttatgttcgtctgtcatggttgcgggacttgtatgctgagaggtgtcagcagatgcagtggacggtggcagccagagcttatttgctccatttggttggttgcatgattttcgctaacaagagtgccacacatattggtgtggtattcttggaggcatttcgtgatctacaccaatcaggcgggttcagttggggtgcgactgcactccaacacatgtatgataacttgaactatgcctgtcagcatcatgttaaacatcttgctggttatattagtctgcttcaggtattttgttaatatataagttaatatttgttatttatttaatgttttggttgaatttcaacagcttatttgtttttggttattttgtttacttaagtgttgggtatacgagcactttcctgccgttgccaacatgattgcagctgaggattatgtggagagtcagccacgggcctgccgctggaagccggggaaggcgttacctctcagtacgtatcggaggcgcctagataagctgacaagcgaggctgtctgttggactccatacacggatcaccgtgcggcctgtccctttgaggtgatctgtctatactccggccatattcgatggggtccatactgcgtcaagtaccatccagagagggcgctcagatagttcggcttcattcagagcgtcccgtctcttctcaccttgcccaccccgttagatgaagaggtggatgagacctggcttcagtacgcacaacatcttgttatcacaggacccccttccagttaccccggccagtgcgatgctgcatacatggactggttctaccagatatcgcacccgttcatgtgcccgcctcagcatggggaagtcagagcccctcctccagtgccagaccccgcacctgatacacctcctagcatgtcagaccccacagttgacactgcagatgatcaggatgacatgcctcgacatgcagtggtaaataaaatgaaagcttcattctagtattcataaatggtaaatcatttattggttggtgacctcttgaccagtttattcgaacttgtttgcagggagccgttcaaaccattgcagataggttgcagagacttatagatctgcgcatggtgaccgtcgacaccgaaacctacgacattgtggatgagtgtattacagtggcacgcagtgtacgcgacgatcgaagagtgtatgtgcggtcgagacgtcgtaggactggctcgcgtggagattgatttgttacattattcgtgtagcagtatatacacatatgtatttacattgtcatattgttgaaacatttcatttgatatatttacatggtttgaacattatccatctgcgtcagtatttagtttagtgaaataaaattatgtgccagttatacaaatacataaccgacgtacaattaggtgaacacaaatgaaaaaactacataaagtcacaatgtacgccagtgttgagaccccctataacagcccagattaacataagctggtggcaaagtcgtcaagctggtatacttctgcattcgactactgtaagtagatggccagcttatgttgactcatattcatttctttagacatcatatcatcatgcatccaattatcattatccaccttaacaaacaaattaaaaaataaccatcattaaaaaactaaatgcataacaaccatgctcaaaaaaatatcctacaaaaaatattaacttcacaatatatttttaaatgaaaataggacaaatacattaaattaataatacttttaacaaattaaaaataaaaaatttaaaaaaataccttacggattggcaatccgtatggaccatacggattgccaatccgtattatcattacgggttgcgattcaaaccagaacgtacctccgacgaccctccgacgactccagcggccaacggaaactacaccaaagctaaccaccacttccaaaatgccgacgaagccacaaccaacagccaacgaagaagagtgaagaaaaagcatgaagaaaaagcatggacactgctggtgtatgttaaaaagcaaccaggggtattatcgggatttaataaaaatgctgggtgtattagaaatcctactggtgtaggaagttaatgccaaataattttcaatggcaaaaaattggaggaagttggttttgatggcaatttttatttttgggctttacatggttgcgtctttacaaaattacacaaatcaaaagcccaaaagaagttaataataaaaaatgtagtatggactggacccacattacacccttcgaaacatgcaacggaatagattaaaattaaacaataagttgtaatattaaaagtttaaatcttaaaaaatatcattataaaaagacttttttattttattcccagttaaatacatcttccaggaaagacaattatgtttgaacaagtagaattattatgttcgagtcaaataaaattattatagacagaaaatttctttttttaattatttaacacaattacatattcaagatctgaacttaagatttatgattaaactaaatttttttagataagttgatccacatgtttaatgatgaaaagaattagttaattaaatattagaaaaatgatttaaaaaatagtatttaatacaattacatatttaagatctgaacttaagatctatgattaaactgattttttttaaatcagttaatccatatatttgatgataaaaaaattaattaattaaacactaggaaaatgatttaaagaaataaataatactagtcaaatagtaggcaaaaattaataaataacataaattaattatttatttagcaaaaaggggtaaatgggccaatatgtagcaaactggggcactcaatcacgcccatttggggcgtgtttaaacacgcccaaatggggcgtgtttgtgcacatggtgacacgtggcagcaaaaaaagggggtgtggggttttcgcggtgttttcgtaaattacggaagaccataacttttgactggaacgtccgattgacgcgaaaccggtggtcacgcactcgaaatcgagaggagaagctgctggcaagtcccaaaaaaattttcccaaaagaggtctctaagtgcctcaaatttgcgatttaatcttcggagccctaaaaaattttttgttttctgatattttgtccattcaatcggtgaattgcaagctattctttatttatctaattacttctcttaatttcgagagttttgacataaaatacgtctccatcggacattgttacgaaaaataacgactgttcaaagttatatgcaatgtcaattctacactatatgtttgttccatttatgcattaaaccaaaatcatttaaaaatgtacagtaagaaccttgacgtacattgtttcaacttgtgccaagtccatcatcatatacacagataaaaagcaaaacagaacaagaaataaaacgtgtgatcatgtctttctcccattcatgttcttcatcagctcatgctcatagtcgtcagagtaaccctttaatcccctactatgtacgccccatcaacttaacaaacatcaacaattaatcattaacccaaagccctaaacccctaaaaccctaaaccctaaaccaaatccaacagttaattaacccacatccctaaacaaatgcataaatggttcaacattcatatagtgtagaattgacattgcatataactttgaacagtcgttattttgtcgtaacaatgtccgatggagacgtattttatgtcaaaacgctcgaaattaagagaagtaattagataaataaagaatagcttgcaatttactgattgaatggacaaaatatcaggaaacaaaattttttttagggctccgaagattaaatcacaaatttgaggcacttagagacctcttttgggaaaattttttggttcggggacttgccagcggcttctcctctcgatttcgagcgcgtgaccaccggtttcgcgtcaatcggacgtcccagtcaaaagttatggtcttccgtaatttacgaaaacaccgcgaaaaccccacacccctttttttgctgccacgtgtcaccatgtgcacaaacacgccccatttgggcgtgtttaaacatgccccaaatgggcgtgattgagtgccccaatttgctaaatattgacccatttactcctttttgctaaataaataattaatttatattatttattaatttttgcccaaatagtatgaaaattgcggaaaagtactgagtatcagagtatggtacacgcaaacaaaactacgttagtacgtggtgctggcggctgagtgtgtgctaaatttagcgccccttggctcgatgacttgaaggtaggaaaatcaattttgtacgctattttttttattttattttgtattttatctgtattactttttctactttatagaaaaaaaaactctgcataagagttcctgcatgtgcagcaagatggtcacacacactcacaccaaaggctctctcttggtatagaagttgaacaaaattctagaaattggagtaatagaatgtaaataattgagggtgcaaatatatatcacgatcaagtagttattgtgcagtgctagctgtcaaatagtgatggtggtggtgagctaggtgcccccagtgggtggcaattcagacagaccatcttaacttcttcacgttcacaacagagcactctgccacatatcagtgccgtgcaatgcatatagtcaaaactgtatcagaaaactcgtgtagctaagtcttcctccccagacccacacaagtagtaatatcggtacatttccgatccatatatttacatctgggtagtattagaccgtggatctcatccagcaaacaaaaagtacgtttcttctaaaattgatgtttgaagggttatattccaaaatggtaagtcatgagattaattcacgagacataaagattattgaaataaattatgtttcttccatcaaagtctttttcataagtaaggtagaataagaacaatataataattctttcaggcatactctataaaatagttataattcctttgttcacgtgtagttaagtttatttggattttttgaagtgttaaccggattcaagacttcttaatagtgagttatatgttttcaatctcgaccttgaccatgttgtggatcatcaaatgtatgtgttcgatcgtgaatcatacagcttaacttcaagggattgtgaagtgttcgatcgtgaatcatacagcttaataagcatttgtgcttttaagacgtttgagtgattctcaattgtccaattgaagatggatggacatctaatccttggacccaatataatggtcaagagtcaagacaaaatacacacaataaataggcatggctcgtatttgatcatatgagatcatgcataatagagctcatttgaatttcttgagttattaatcggattgacgactcaccaataagtgtgttatcatcaagctgtgttaacaacatttatatcagaatcttaaactttccaaataaatgagtacaagcacattttattttttatctaaagataggaagctaaataaaaatagggtcaattctttaaactttttttttacataaattatttatacttttaatttatataaaatttctcccattataaaatatatatattttatatttttatttttattttttcattatttatgttattctaatataaaaaaattcaattaaaaatttaataatgtttacttttaatattttcaaatagtgctaccttatagatagaagattttatgtaattagtcaaaatatgtaagaagggttttcttgttatttaaaaataaaggttttaaatttatgtgtatcatattccttgggtcatgttattttctccttctctgctgatataggattttgttctgttgtcatagatgaattgtggaccaactaaattagtgtgcagattgtttggagtcatggttttcaacagtttcaagtagatcagactcgcaagtagccattatattgctcactactggatgtcctacttaatacttaccatccatgcttaagtcgatcacgagatactgaagttcctagagcttaattggaggtagcatttcgtgacatcatgccttaagagaaggaaatcaagtggctgattgtttagctaagcttggtttgtccttagataaacagctatgaatttgtgaaattattccctctatttttatcaactgtagttttgacagatgtatcctctaccacgttttcttgtgatttttaatggattgttcttaggggtctccccttccattccccaaaaaaaagatggagagaatttgtgtaggttttaattgcatagaaaaaatgtctaaaaaatgtaaaatagaaaggaagttcgaacagtttacgtaaaaaataatataatatttttatatgtaaaataaaaatataaaagtattttcttaaaccaaacaatttgttaaaaaggtttaattttaagcttttttgcatttggttctcagtgattaggtgatcacaaatgatatgcctgatatgtttgttctatcatactttgacctccagtgcatccgttttctcttctcagtggtgttttgatatttaatacttgatgatggtgacaggtgaggaagctagagacttcatttctaaattgtaaacgcgttatcttttgaaatacaccactatatatgttcatgtttggtatgcattcatactatgtgtgaaagaccatgcgagtttgtctattataaatagtgtcctagcttgtaacgtataacgtagtacatatcatatagtaatgactaatgaatgaacgtgcccacttcattaatttccatcttcatccttgtttaattaaacatcagacggttctaaaagattaagaatttgataaattaaaagaagcacagcaaatcacgtctttcatcagttactacttttcgcaattatttcatgtcagccatttactttggaaatgctgaaatgtacgtaacaccaatatcttttctggagttgtgatcttcaatggatttgtttcccaaacattctttttaactagtatattccaaagatgctgttcatgtgcatcttttataatatgttctgaatttccttcgaaatctagtcgaaaactggatccatacccaagtaaataacatgtgcaaacgcctcaattcaaggacagcatacgataggaaacaaaataatattaattattgtcttattggtaatgtgtgttccaagagtacaatatttttatatgtaaaacaaattcattttgaggttgtatgatcatgtatacttgggagaaattctaatgggcattccaagggaagggaaaggcaaaggatccattgcgactggctcatctgggtggagtaagaaccactcatattgggtcacaacatagtgcacaaatatgaggatatttaacttagctagtaggtaccctgcacacactcttggccctcctccaaagggaacaaatgcatattggggtattccgatccctcctcaaacctacttgggttgaaactcataggatccttaaaatactcttcattgtaatgtgtcccgtatgttgtccatagcacctgagaagagccacaagaaaccccatgttacatgatttaattcaaaattgacaaattatgagatatgcatgcatggatttaagaaggaaacaagaaagtagtattcaccttccatcctctaggtataatgaatccttcatattcaatatcagtaatagccttcctgaaagaaccaaagattggagggaacaatctcatgctttctctagcaacttgccaggtatacttcatcttctttatgtcctccattgtgagattctcaacccatcttttgttgctcattatagcaacatgttctgcataaaataagaacttcaaactatcaactatcaactctaaatacttttggataatttaaagaggaaatagtctatacacttacattatgaaaagttttaagaatattaattaattataatttgatatatatggtaagcttttttttttttttttttttttttacttttatcataattatcttaaaagtcgtatctattatgatttttgattgattaataatgtaattttttgacataatgcatagaaattaaaatctaatttaagtatgatgatagaattagattaccttgatgaagttatccaaagaaatcaggatgcttagccaacatcttgaatgtcatagcaacagaaaaagtagtatcttgagctgcaaaaactagtagcaccacattgtctatgacctctttttcactgatctccccttggatcatcccatataccaatttggacagcagcattccatcttgttctcttcccatgcttccttccatttcccttctcttctctctcaccactttgaccaacatcttttctatctccaccctggccttctttgctctccaaaatttagaacctggaaacatgactgctggagaaaacactccctccaacactctttcaaaggtatctagcatacctggctccactttgattcctaataaccactcaaacactaactgaggacttttgttgaacggtaaagactaatcttttcttggcccttccagtttgtagctaagtgaaactgaacaaaattgcacagttttggaactactagctcaagtccagcataaccaaggcttgtgccaataacaccacggaggaatcggtgccccatctatctgcatgatagagtcccttcccatgagcttaactgaggaagaaggccaagagattttccccaacttgaactcattagacaacaagaatttattggcctcagctccattcacaaccacatttggagaccccatgctccttgttctgaaaatcttctcatgcttcagaatgcgaggatgaacaaactcttcaaacaattggtttctcctttgagcattgaagaattccatggtctcccctatcaatggaaaccccatttcccctgggggggagctttcttttgtctttgtagcattgcttgtgtctcaagaaattgaaagagactagcaaaagtagtaggggaaacaaaccccacaaaataaaatagataatatccccaaatattggtgaacttgtaaggatcaaggacttggaaaaatttaagttcatatctataaattgttttaagattcaagtgttggttcagcacatttttataggaacctgtggtttgtggaagaagatgaatgaagtcaaacccaaatgaattttacgattattataatcttgatcatcctagaagtcaattccttcctaataaatttctaatttgtgacagaaacaaaaaaaagaagaaaaaataatactgtagcaccacagcttgtgaaaagaatactgcaggattcttttctgtaatagattcattgtccgaaaagaatgacacgtaatcatcattaatatacctgagaaattcatgatggaaaataaaaataatttttctcttcatggtcaacgctagaagctttttagttacccaagaatccctaaaaatctgcaggtgaagtctcgttgttttatcatgtgactttggatcatgtttcagtcatcatgattgctcattattgcagcaatgtaaatactgattggtgtctgatggtgcagaatcaccgtctctgaatctcaactttaaaatatcttcttaaagtaattagaaaggtaggctgataatgttggagataatgttgtttgtaacagcctaagcacagtcgttgaacattccaaacaaagttttcggagcatggcgataaattaaatcagcatcatttccatgcatgttagaaagctggattttgtgaatttattgcttgttgggggatgtttagcatagaaggttcatcatttcatatgttaaaggaactctataaacaagctgtgaatgaattgtatacagttgcttttttacaagaaatattatgattacaaaaataacaagatttgtatttgctcaatgtcaccaaattttgactcgttgttagattattactatagcaatcatcgggccaagattaacaaattggttacaccttttgattaggtgtttaagaggttatggattgtctaactgagattaataaattgcctgtctttcatgtttagcatacgagggattgtaaattgtttaaccaaaattaacatttgtctatgccttttagatttagcgcttgagagattgtgtattcttcagccgagactcaggccacacatggccaattgactaagcattcaacatgcctttaaacagattaatgagataaatcaggctttcaaagggcaaaaaaataaacctataataaataatataccaggcttaggctttggatcttttaaacagatcaaatctatctaccatcaataattgacacaaatgataatagcttatgttacttaatcaaattatttagggatcaaactccaatattagatataaatgctccatgctggaaagagaatatctatcttaggtatatgcttagtctctaacaaaaattagtcactattttttatggtgggtatttcgtttcaataccatgttaagcaaaaaaaaaaaaaaaaccttgttcatcctaacttatttctactctaacaatgatcaaccacgacttttttgagagaattacctctattattattccatatgatttcactaaacattagtataattttgctgtagttaaaatagaagtaaacctggcttttgtcgtggaaccttgcctatactggctccatagcaactgcattcataaaccaaatttcactctttaacaactcgtctattttggtaagtaaataaaagaaacttattaacaacgctatggtccttccaatctggtataataagctcgtcgattctatcacagccatatggttaccaccgaaacatattgccaactattgagactgaggacttcgaaggaagcaacaacttttatgtcaggagggaaagcttcctatagacataattgttagcatgtgatagactcagagacgttagacggttgcattcaatacagccaagacttaattatcaaaacttatgcagattagacgatcgaaagcattatcttttgaacaataaaaaaaaatacgaaaagaaaaaaatgtgatgaggtagttaatgtgaagaaaaaagatagagaaaatagtgtttacttccaatccttaggtgaaatattcaaggtataatttgaattcttcaatggtcttttacgaattaaactctagggtaattacttgtaagactccaccagagtactactactatccaagacaatgtatgtcatagatggtgaagtaaattagaatttgagtgtgcatattttgggcttacacttatatggctctcttcaagctaggacgataattctcatgcaagataatgtgacgaacgcttaatcccacaatttggggttgttcattgctaacagttttatgtcatatgtctcagcatttcacgttcgtatgagctcttgactcttgtgtacgcaacattaggaagtggtgaggaaaattaaacattgttgagtagtgatgaattgtacttctatagtttttgggtcaacatgtctactctaatcaaatagaccaagggtcgagtaacagtccaggtcaaataatattataaaaatattctaaatacaatgttacagtataaaaataacattactttttttgtgcacatgtaaatttattatcataaacataatttaataatgattattccgttaataattaacataatggatacctatgggcttgttatttattagtcatcttccagcttcacttccccccgagatttgcccaacacctgtaaccaatatttcaggaattattaattgtttagaagggtggtccttcaccaatgtaaaatgagttatttctgataaatttatgcaaaaaacagaaaacacctttcttctacatttttttggacttgaatccactagtatgttggatttaaatttagttaaatattttgcttgttatgtttcttaattatcatataaaatagtactattaattaattaaaatgtagataatgaatttgaaaacgagtgtctacctatacataaagtataagaataatgaatactagcattgctacctatataaaaatgaattggagatgaataattttctaaaatacagatatatgaacatatgttatataaccataatcaatgattctacataagtgattaatatgttgaaattaagattaaatcatttgggtaatatccaaactcgatcattgataaaaataattattaatcaaattttatttaccttccaatcgaacttaattagtcaagattcttactttctccctggtaaatcaaagtgttaagaaaaaaaaatatcaccatacaaatgaaaagcattctctcctgaaattcatatagaaaggtttatgtgtcatgaatatttatttacttcaaacagagaaggtgctccttccaaagtccaaaatgtatgtttaccaaggcagtaggcacacaaaatctaaattgaaactccagcaaatgaaaaggtgttgaaacatatgaaacactaactcggacatggagatagatataacacggacacattaaaatctaaaacataggatatgggtacacaatattaagtgtctattgattttaaatttttttgataaaaaataaaattagagaagtatatgtgatttgtccagataagtatttggtaagtggtaactaaattaacaaatctaacacgatataaaactatcaatattagatcccgagaaaacgttgtcctcaacttgttcacccaatgcatagctcaagggccagttagtgtacgctcctctgtttatggccgaaatttttttatcatgtaattggcaattttttagttttttttttaactttacatataaaatcaattttaaatataaatgtcataaagtagtaggacagcgtgatactaaaccctaagaaacatgaaaagagaaaaatccaaatccttatttatgtcctattgatgaagaacaatatacaaatccaagctttaacgatgaactcagaaatgtccctcccgaagcaccagtcccaaaacagtcacaatccatgaaaagttcacaactccattgatgagagactttccagttcctaacaatagcaatttacttccttacaaacaaatagacaacagctttgtcttttctatttagtccataggcgacagctcacaggctcacatccaacttgttttcctccagtcctatacactacagtctgcacactcatttatgtttttatatcaacaaatatttaaggatatgtttagataaatttttctataaacatttatagaaaaaaaagtaaaatgtattaattaaacttctctataaattaaaattaatttatacatctttattttttattttatgtttctcttttgagggtgaaaaactagatgttatttggtagtagaaactgaatgatttgtgtatgtttagattaaaatttgaaaaattcggcctgaattgatagaagttgacttgagctgagcgtctcttacaaaaaaggtgccctagtcgcctcgaattaaacttaagtttacaaaagtatctcaaatattattttttttacaactgagtttcaagacaaaattttagtctcaaatatatttttggagattaattaaacataattgtaaactcattttcctcttaaacatacttttaaccctcccaccggaaatccaaacacacccagccttagcctttgtagacacaaaatgttccacttggaagggaatttcatctatccagtatttctcatgcaaatcaaaagctaaagatgctaattcatggcaactctattgctaaattgctataaatacttctaataaatttagtaaacagagtatatgtaaacaaatttgtaatatacaaattcaaaatcgatgctcgagtaatatcaaaatgtgaggacagcttgtaatcttaccggcaaaaaaatggggggaaacaccactcgtatccactactctcccaacatttttttagtaaactcacctaccctctgccattgtcatttagttcggaatgactcacacttgtaatcttcgacattagggtcccttttctctctttttttttttcaactgccttagttcaatatattttttttcatgcaaaatgattattacataaatattgaatttgcatactaaaatatatttaaattgaatagaatgataattgtacaaaaaaaatgctaattgttatttataaagtcaaataaaaatgtgagtagtatttaaaataataaaaaaaagaattttcagataaatatcatatatttattgcaatttatgtgctagacttggtacaaaatagtgataaccgccaatactttccgtcaaatatgtacacaaatccggcaaattttgagtatacatacatagatattatacaaatgactatatattacgtagatcaaccccggcaaattttgagggtatcattataataaatacttagaaatctttcatggggcataatattgaaaaattattcctggggcacgtctccattagccccaataaatgcatcgggtgctggagatttctctgtcaagtagtatttgatttgatttgatttattgaaggttaaataaatgtataactcactaagcttacagaatataaactggtttacgcctgtaattaataccataataagacaaatgcaacactcaaagctaatgagtaatttcagtacaatccagctcaagcttatgatcaacaagaaacaaaggccagagttaggagagtgcgttgtgtgttttaaagctattttagaaaactcaggcattattgcatgaagtagtagtaaatacggagtaaatgctcctgcaaaacatcaactaacccgcatactcctccacctgctaatatttactccactctgtgaaccattttatatattcttcccagtccactcccctctccaaactcaaacccccctttctcttctttctcatagtgttctaagcagtcagtgacaatggagaggaaaagacacagtcctatttctttcactatgttcacattgctacttggagtgctttctcagaaccttgtcatccctgtagtatctaccactgccatcattgtggaccagaagaactacaactctccagacccacatgcaggaacagatttatcaaattctctatgtaattctcttactcaactatacattttgcttcattatttatgcaaaatagaagatatcatttccttgctagctacagtaggccatttactttcaaatttgacgtatgaacgatcaagagctcttaaagaaactatcttgacatttaactttaaaatctaatagtatacgttgcttttacttcttgaaggttcatactgctctccagatcatggctctgggagtggtgggcacggaagctcaccacaccactctcatcatggaacaccctctcatcatggatctccatcacatggaggtggtggaagttacaatccaaccccatcaactcccccaggtggtggaagctatgatccaactccatcaccaccctcaagtggtggtggaagttacaacccaaccccgtcaactcccccaggtggtggaagctatgatccaactccatcaccaccctcaagtggtggtggaagttacaatccaaccccatcaactcctccaggtggtggaagctatgatccaactccatcaccaccctcagatggtggcggaagttacaatccaactccatcaactcctccagttggtggaagctatgatccaactccatcaccaccttcaggtggtggtggaagttacaatccaactccatcaactcccccaggtggtggaagctatgatccaaccccatcaccacccacagatggtggaagttacaatccaaccccatcaccacccacggatggtggaaattacaatccaaccccatcaccaccctcaggcagcaactgtggcacaccaccacatgacccctctactccaacaccctcagtcccaacaacaccatcaaccccatcaacaccatcaaaccctccctcaggaggaggtgggtactataactcaccaccaacttatggaggtggtagccccccaacaccaatcactgtgagcccaccttcaaccccagttgaccccggcacccccactatcccctccacacccccttaccttccttccccaactcccttcactggtacatgcaagtaagttactacttcttttcactacattgcactataaactatgatatgatatacagccacactgttaagtaacctatgggaccttgtcctctaaattgcagctactggaacactcacccaggaatcatttggggattgctaggctggtggggaaccttaggccatacatttggtgtctctagtatgccaggatttggtgccagtctcagcttgccacaagcactttccaacactagaactgatgggctaggagcactctacagagaagggacagcttcctttcttaattccttggtgaacaacaggttcccttatacaacccagcaagtcagagacagatttatagcatctcttgcctcaaataaggtagcagcagcacaagccaacctcttcaagatggctaatgaggggcgaatgaagcctcgagcatgatatagttaatttggtctttgtgtcagtttatttagttaagaatattatgtctaagacttattctaagagtgtgttatttaggcttttatcttgtgtaatatggatatcgttttactttacaagttcatgttagcctttatcgtttcttattctgtaataaagtttatatattgttacttcaatagttcaattatatctgcattcgaaagtacaaacttcttttcattatatatgaaaaaatgcaaaattcttattaagataaacttatttcattatataaaaatcacttcaactcagctaaaatggaaggcaaaatcagaatctgtgatataattcatcaaataaaaactgaggattgttataagtacagcactaaaagggtgcatcatcttctcattaatgaaggtccacctataaggatgtacataatctatcaaaagaaattgattacccataaagtgtaatttagaaatagccctagtctagaaatgtcgattgttcatgcaacatgatggcattcaagagataagaatgatatggtgagtcttgaaaacgtgaacaaggtacaaactgtaaagaatgaagttgtctagaattgtttcctagtgaaattcaagggaacggttttgttgccaatatatatgcaaacaaagacaatagatggaccaagatgctggcaatggtgcccctatgtgaattgggaatgatgggttacagtggcagaggaaggattaaagcgccatgtgagctccaattaatgtcttttaaagtgcctcaaggggaagtgtacaaggctgtggtatggtccagaacaattacaccggcaggtaaagactataaaaggagggtagtcttcccagtgtaatgtaaaaagattcattatatctttaaaacacaaacacaaataaaacccaaaacacgtcttcaacttaccaaatacttttgagcaagataataactgagatattaaagacctctactagtttagtcttcccagtgtaacgtaaaaagattcattatatctttaaaacacaaacacaaataaaacccaaaacgcgtcttcaacttaccaaatacttttgagcaacataataactgagatattaaagacctctactactctagtgcacttcgtagctagaaagttatattgctttgctatatatgatatatttacttgtgttaatggtaaggaataaaacgaagaacatggatcaaattctttgtgatttaaaaagaaagtattttttttaattcaaaatatgtttgaaaaaattatgttaattagataagttttttggagaaaaaaaaaaaaagcaaaagcctcagagaaaaagttgggttgtgcttttctttttcacaagtaaaaattaatatattctagataaaaaaactataagaaaattatatgtaaaagcatttattttagtttatccgaatgaacccaaaacttttaattttaagaattccaatgtgtatataacttttaagctccaaaagcttttgaatgcttaagatgacaaacaagaggaatatgaagtcatccatatgtccaaggtagtcaaattgagatcccacctaggattggaaaggaggagaacatgtatattgtaagatcctaacaaggatagtaagatctcacataaaatacaatatacaatatacaatgttttcaccccacatcacttccattttcaggagcattcttgtgcttagaacctccacttgcagggacaaaaacagcaccatataattacaagaatttagatgtttattggtagaaaggaagaaagctctcaaaatactatagtaaagatgtttactgataggaaggaagaaagttcccacttcccattcataattacagtagaagtgagtggaattaaaagaattacaagttcattgttcccatggtgccctcatatcaaacacattaaatcttaggatgaatggcaaaaaagataatttcaaaagttattccatccactcccctgtcaatttgaagggaatagagaggtgtggagtggaaaggagtctccttgattccattccttttcctttctaaacatccaaagaatggcatcttttactatctcatataatttttctcctttccacctctcaccatcaatacaagcaaagggtaaaaaccaaggaaaattgtatgcatttaattaaaatactgtcattattcttcaccttgaaattagaagccctcatctaaaactcgcttcaattttattcatttcagttcttatttaaaaattatgtttgcatttcttattttaaattttattcaagtatagatgtcaaattgggtttagatcatagggcaaataagtctagtagtcaaacttgcagggtcaggctcataatttgatagccatattaaaaagtgtattttgaaactcaagtccaccagggtattcaaatttcaaagattaaacaatgatttgtgcttcaaatctcaaaaaaacagtagaaagattacaattttaacaaaatctaggataacattcagcatactgcttgccaaagcacatatggtattggtgcaaaggttcagaggcataccttttacatagataacttctgacagtaacacccaattaagaaattccagcccttgagactcaatctctgataaagaaaccgctatagcagtttttacatgagtcaatggatctcagattgaatttcaggaaaattgactcgaaggttaggtccatcatatacaagtggtttcaatgcaggtaagttttgatgagctcatgtgagattcaaaccatttaaaaatttggtcagaatgcacactagtcatctcatggtaagcaaatgcaaggtttagctcctcttggatgtgagggaccagattcttatccagcataagagctttcttctcctcaagagcctttttccatttgatttgacgcccatctttcctcatataaccatttttatcaataaagcccttttcctgaaagaactcaaataaatttctggaaagagcctgatcaagccctggaattctatcagctaaagtacttggtgacaatggaaactccatacattcaacaacaccaacatcaatccctttatcttttaaaacctccacatactcatctattttctgctgcctataaagatctttgggcatgtgaacaaaaagggtcggcgggtagtcccctttaacatcaatttgctcaaacatcccctcagcaatcatgagcacagtactactaaactttacggcggtggcaagcacagacacaaaataccctccagaagaagcacccaaagccacaagaggaagtttctcaagcttccttctatcaatccaccactctataatgtctttaacaaccaacacttctttaccaaatgtccaacatctttgtgcacttgaaatagtaataacagcaaaaccttgggcaagaccatggagtacaagcaaccgttcctcaggcaaaccaatgcaatcagggcattcaggggacttgtcccagaagttgattgccctgccattgcatccatgagccagaaagagaacacctttaggtgattcaggcacttgccatatcaaatcagttccattccggaactcttttgttggatgcaaatgcaccaaagagtcaaagctattccatttttgtttaggaagttcataagctaaactgggattagcaccatcactgtcataacgaaatactaaaaggaaaaccactaacattagaatcaatgaaaaaaacatgaggaacacagaaacccggcaattctgagctccactccatggctttggtttgtatccacgcttcaacatgctgcaagaagggttgatagaaagggtagaaaagatcaaaattttaccaaaaactttcttgagagaagattggtaaaccatgaagggtcgatagcgttaaatcaaatgcatcattcaaatcagaaggagattacctacagtgttgaatctccaaaatcgacactacctctgaagtgttgagttgaatctctaggtgcaaggataatccattggatgaatcactgaaatgttctgtgcggtaaacgatttgcagttttgcactttagtcggttgctggattgctgtcatttgggaactgttgttttcacccctttttttgctaagttcatcccttaccttcttcataattttttaacattaacacctgatttttttccgaatgacacacaatatcccaccttaacgatttcaaatattattgggaatttgtgtaatacaataggcgtattagtataatgttttctaaggatattattgtaacaatagaaaaaagaattatgttatgcgtaattcgaaaaagaatatcacaagatactggtgtagtttgcttctttatatatataaatacttttgacaaacttatttccattttgcatacaaaaactattgcatataaattaacatgtgttaaatttatattaaaaagtgaaataaatatgtatatttagtttaagttcctggtctattagaagcagaaatccctgaatttatagaatttctgcctaagatcatggctgtaaattaagctatattcaatttaaatgtgactttaattcatcttttttttgaaataagagtgaatactattattctaccaatataaattaattatattttggtttcatgaatgtatgtccatagtgagtttgacctgtccacagtagcattttgtgatttaatgtgtacgtcaactcctactcaccaatcttatcttcttgagcaaggtatgcacaaggaacatcaagtaacttgaatgtatatccatagtgagtttgacctgtccacagtagcatggaaattttttattaatttaattaataaaaatacatataatgtttttttgaatacaaacatatcatataaacatcacttttaaagattctcaagtcataaaacattaaagtatctgtgctgcaagttaactttcggcagaaatcattagttttttaccctatatttgctaattctatgacattcaacaagccagacctttggatttaattctaatatgcaatgacattattttttttggggtaaattaagaaaaaaattagacaaatatataaaaacaaaaacaattgtttatttcattaaaaacattctttttacaaaataaatttaaataaacgagctcacaatataaattcccactgatatttttattacaagcttgatcctgctgttttcagtattttgttaggagacaagcaaattatattgtacatcttctaggaaagacatcgcaatttcatgttagtcactagtttttttttattacatatcatcttgtattaagactattcttaccaatgaaatgctttgagttgttttactttaaaaaaaaaaaaaaaaaaaaaaaaaaaaaaaaaaaaccttgatcctaatgaagaagcattcttattcttgttgatacgatttgtgacgcaagttccatcttgggtcccagcccgcacctttccgactcatattgggctaacaacagaacaaggagcacttaactatttactgggccaactgtgggcccatttagaagcaccaaagacaacaaacatcaaccatgtgcatgtgcatgcttggttccttcagccaccttcacctttgctccataaatttagcttttgactttgtacactccatcacattcctccttttcatatgtctcctttgtaaagcagattccatattggtttcaatatgcttaatcatgttatatttttcttcttcttctactttttgtttaactcgttacccattttaaaattttaggatttcaaataagttattttgtattggattttaaaattttaggatttcatgacgcttatgcgtctttactctttagtaatttctttaataatttgttagattattttgtgacatataaatacgttgattttggaaacatgcaagtttttaagctcactcttgtattaaaattcaatagactcttcagttagagtcactctttcacacaaacagaataaggtaaaaacatattttttgtcttattaattattatacttgagcaaattcattttcaagattcagatgttagagttacaattagctcttgaaagaaacaaaacgatggcaataaaactcttttttggagtgacatacatatataacataattagagtatctttagtaccaaatcttgagtatggattttgagttcaaaatttgattttcactaaatttttcaataaagcatatgaacaaatttttaatatgaagaatgagttctcgtagaagatctgtataatattcaaaaaataataatttgttttccctacaaaaaagaataatttgttttctcttcctcttcttaagatctcaaaattagatctatcactaaagaaacaaatgagagagatcttgatacatcttcaatcctatgtaacattatgggatcaatcaaaaagtgatttaagatcccaatttagaatttaccattaaagatcttcttatatcctctcttagtgtatgtattagcaatttataaaaagatgtgtaggatgaaaaaatcactaatttaatattttaatttatttattttaaggatgataccgtaatttaccatttaatctgattcaaaaaaaataaagtaaaaaagagtatgatttctctctcgtctttaatgtcattcgttccaatgcatgttgtctttgcatcttctctcataagtacatccgacaactcagaattgcaatagcaggccaacaactatgcctagattattagcctacgacaaacaactatacctagatgatcaatataataagttcattagtcatcatatatataaaagtcacgcacaattaaattttaatttttaatatccgtgtatgattatacaatttgaatttagagttttaacttcttataataataaaagttcttatttgatacccacatatacatatgtatacgtgggtatatatatatatatatatatataaaattgttgacattcttatatcttctcttagtgtatgtgtattagcaatttatacaaaactgtgtaggaccaaaaaaatcactaatttaatattttaatttatttattttaagaatgttatcgtaatttaacatttaatctgatttaaaaaataaatataaaaaaaagagtatgatttctctctcgtctttaatggctttggttccaatgcattttctctttcttgttatgttttgcatatatcttctctcagcagtacatgccacaacccagaattgcaacagcaggccaacaacaacggctctaactcagtgatttacatggtcgctagctatgatttcctcgcggatcatgatggtccttctctactgtgtttctgcggacgcgctagtgcaatgaccccaacaccaatgttgtttatccctcatcacccaatacctcctgaatacttctgaacctcaaagcataagcaacctgaaaatttacaagaatagctagaattgcacccacctagcttgatcacaagggaattataacttttctttgcctattcatttttagtaactaaagtgaaatgtcgaccaaacttgtaaggatggaaataaattttttgttgtaaattcaatataaataatgtgtgattcacatgcgatcaaaatagacacatatatgcatgtgagattcaagtattattactttctccttaacaattatatttagaagccaatatagacgaaattgacaaaaacacacacacagaatgtaaaaatgttgtctaaagttaatttagagataaaaacagagcttatatcgaatcctattaaatatgtatatcataaaatagaatttaattaggcgaagagtccataaacatgataaatctacaaggttcacactatcactgcaagctaaaaaaaaatgtctaatgagtcattaaaatggtgacataacatatataacatgaagccatagatagtgatagctcaacagtcaagacgtacgtagatatatatatatatatatatatatatatatatatatataggtgaaaaaagacagcatatgtttcatatggactggagattaaagtggtaaggactgaatttaatgttaatagtgaatatgacataaagatataatatacattgaatgaaaatcatatctctctcacacaaacgaaaaaggacggacttaaaagttaaaattatttttaacttattaattttgttcaaatccataattctatccacttatcatcctaatgatgtgaggaatgtgaggcaattttattttttttgccacaataacatttttcattattgaagaaaaaaaaaactgaatattgtacagccacaacatccttatccatttcattgtataatgactcaaggtagctagcgtgagtgccatatttcacgtccatattatcctgaatcaacgtgcccgtaaataaataacgttatcatagtggacttggtgtgatacaattcaagaataattaatgaggtgcttattttccatattcataaaaaaattgtctatacattattatttaattattgaccaaagataaaagatagcatattttttttcaaaaaatattaattgttaatttattgattttttttacagggaaaattaaacttgagacttttttagtttttattttttcttaaccactcaactcatctatgtgcttgctccaattctgcatcaagaatcaataagggagatattaaggtcagacaatcatgtcgtagtcctttaaagggagaattttggtagtcttatatcacgttcgagggctttataacaatttttaagggcggtacacgagtaagaaataaagggagaattgaatatttatgaaggcattcaattatatgtttaagtaaaataattaatgaataagactctagaaaaaggaataaaaaaaagaaaccaaactaatagatacttaaaatgcatgtgtttgatttttaattatcctacgtaccaattgtaaaactcattcgtatgatatattgatattataagcaacttgacaaagatattgcatcaacatgcatcaatgcatggtatagattgctagacctattagttccacttaacatatgagtgcttgctgtttgttgtatcagagcacatgcagctctctctctctctctctctctctctctctctctacttagtttcctcgctctataataagttaattacttatggatttccttttttaactctttttgagatttatgatattttcctcatcaacttacaattacttgtatccaaccgaattctgataatagtcacctgtaattaattcacgcttctcgttcattgaagaaaactttctttgatcaatgtaaattataatagaattttaatttgtaaatcataaatgatttttttgttaattagaatagtttgagattttaaaagtttcaaggttttaaatatttgtatatttatatccgttatcattaaaataattatttatcaattgagttaattttatataatatttttaatttaacttttacatttttacaaatatagctgttcattgcacgatatacataattactacttttcttttctttttattaaaaaggagaatgacaaaagagacagataaattattaaacctactagttatagtagtattttctttctattatgtcttttactttccaacgtaatcatatcgttttacgagaggatctaaatcccggggtaaattggtagaaagagaggatttaaatgatatatagtagtatttattaaaaaaaaaaatcatctagaagttttttttcccattatatattttttctttacgtgtcatccttacctgtttgcacccctatctaattctttaggtatacaatcactaccacttgccatatttttttagaactctacatttttcaaaatttaggtaaacacttactaataataaccatttttttttccttggcggaaaaatctcggtgtagaaactaagatctaacctatagtcgttgtaaaaataaaaaataaaaaaaaaataaaaaaaagactaagatctaacatacagtcgttgaagtttatgtaaatttggttaatgatgaaacaggattatgttttctcagttggcatcgaactacaagtaattaattaagatttcacacgcgcgcaaaaattattaataattcagattaatattagtattagaattgaaccaaaccaaccaattggcatgcactggttgaaccagaaattaataatcaaaccagttcatttaactctagaaatcagtcttacaaaaaaactggtataaaaaaccaattgaactaatccaaaactggacgaatcatccaagtttgaatcagtttgcccaaaaaaactatttatattttatattttaaattaaaaacttgatattataattgttgatataattctaaaacaatattatgatgaaagataattatgtttattatctttattttttaagcgtagttactactaataaatattattatgtgttattaaatttaaatattatgatatatttgatttagtttcatatttaatttttaatattatatattatgagtcatgaattttataaatttaatttattttttaatattatgaagttataaatattatgtgattttttgtttaatattatttaatatattatattaaaataaaaataataatattaattataattaattataccatttcgcctcagctcccactatgatttttaaaaccttgattcagatgtgtggctgtacacaacgttttaaaaactggggccgtatgccgtaccaaatactactactacttaacatcaattaaatataagtggtagattccttttcatatgtccatccaaatctaatttattaattaggagatcattgataaaacccatgcaaaatgtagaacttgtgataatcaactactaccggcaaatttaataataataataataataatttacaagtagtttaaaatatgctatttaatattttgaatattatatatatataattttctgaatatagatttggctagcttctctaaattatgcatatctcatgattttttttcaatattttaaaacagtcataatttattgcatatgtacataatattagctattaatcttatttattaataattaatagtattgtttatttttctctctaaaataaataagcccaaatatatacctagaggctagctagatattttacttgtgattgctttctgagtacatctagcgttgggttgcacacatcattccataatatatagttttagaatatgatcaataagtatagattaatattttaaaaatggatacacaattataagagcccaaatccgcattgtaaaaaattgaacaacacgtggaggttggagacaggatcgccgacttcaacattaatttcttaaaaaaacaaaaaacgagtgaaagtggtacagtggtagtacttctttgttaatagtcattaaaaacgttagatttccaaaagatagtaaattattaaaagtttttaataatttttttagaacatcaataaaaaattaaaagtataagtttttactaaaaatgctatttttttactgctattaaaaatactgttaattaatataggagtatatccgagttatttttagcatgatatgctgctattattattattattattattattattattattattattattattattattattattattattattattattattattattattattattattattattactactactactactacttatttaaccaatatgtttaagatattagttaataagattcaaattttaaattattaaatttaatttaagtaaatacaaatatttttttatcattagcgctattattttttaaacaaaaacttttctttgcaaaatttaaaatatactccatttgtctttaaatataagatacttttaattaatttatacatattaagaatttaaatttaattaatttagttagtaatattaaatttattaaaattttattattttttaaaaattatcaagatatgcctcacttttttatttttatttttaattatttttcatctaattaatttatatgtgctaatcattttcttcaatttttataagataatagatgaacttatcttattaatttataatatttattataatttaagaatattttaattaaaaagattaatacaaaagaaaactcaaaaaaatataataaaaaaaaacaaatagattttaaaaaaagtgtctaatatataaagaaggaggcagtattaatatttttttaattttaaaatattttcacttattataaatgaaaaataaaaataaaatcatatcaacagacgaataaaatgttgattatgtctatcaatttatatattcttttttgaaaaaataaaatgaccaaataataaaaaaaatgaaattgaaaaatactggttatagcctcataggtaccggcagcatctcgaagaagcgggtgtcacgtcatggaggtgtcggcgaaagagtgtcaaaagagtaaataacgtgaaaaacagtggcgaaaagagagatcgcaacaccaaggtgtaattgctatattaatcatttcccgcgactttggttttcgcatttccactctctttctttatctccctcacttcagcaactactactttctttcttttccccgtaactaaaaaactcaaccctcatttcaatcgcagaaaccgatccaaacacgaatgcaacacacacactctcttcgtcactcagatccggtgccgattcgatcggagagaaagctagccagatatagcttatagggaatggaattcagaagatgaagctctatgtatctgcaaagcggattaagagactcgtcgccggaaaaggatccgccaagaccactgctcctgcctacaccgtccccgctcgccggatttccaaccggatggtggtggtgctcggaatcgtgttgctgctcagctttgtgagagtggcggttttggtgctggaatcttctgcggtgtgctccacctttggtaatttttcttttccgattcatttttttacttttggttcgtaattttttcttttttcttttactgttaacttttttgtagtagccagttcggtaaggaaaacagttgagtgtgggacaagtacatatgaatgaatttcagtgtatataatcatagtgaaaataataaataccgaaacttactattttcagcttcatttggcttcttttaggtccaacataataatctcaaggaaatttttatttactatttttcaaaattctcttaacgattactttaataatactggtattttttaagaaacattttgaaatgaattttttaataacaagtatttgctgcaattaaaacttttaataattattttttatatataaacacatgcaataacattctttttgttttgatatttattttttcatagagaaatgcagttgtttcaatttaattagataaaacagattctgtgcatagtttaaacgtgaaatttataaaacaaacgaaaggataaaagtgtagtggaatttaaaattaattaaaatattttgaaataatatatttaaataagcactttttatctttacaaatattatgattttattattataaaaggtgaaaaaaactagtttaagttttgtgatacctttaattttttaactattaatggaatacatggattaacttaatcaattattttaaatttgagtcatggatatatactaatcctatttaagtcgaataaaattattttcaatgaagaatacctataaattatacaaagatacctttaattttaatgtttccctaattaactcctaaatcctataccactaataggttattttatttattaaggataatattcaggtgtagctttataaatgcttttaacatgattcttcaataaaattaaagctttatcttaataatctatgtaataaaatttgactttaattaaaggtttaaaggttaatatatgttagtgaagtaaaagtctagttttaataggagaatagtataaaatgtacttttttatcagcggaaataataatattatcaaatgcactcataatactatgtgcacttaagatcactaatcaccaatcaatattaaatcttaatcagtaatcaaatcactagtttaagatgattgaaaatgactttttttttttatctcattgataagataatatgttaaatgcatatccgtataaaagagaaaaaaagtacagttaaaggtgtctaattaaaagagttgatagaatgaaagtttcactcttcatgttactttattaaattaaatgcaatttttgatctattttcttaatttgatatattaagttttaattaaaaatttgattttaatttttatatttttgaaaattctattttgatacattaagttttaaataatttattttggtctttttataattttttttgtcatactaaagttattattttagtagtagatggtataaaaaaatcttcacactgataggacatcaaaattaaacttaaatatttagcttgtttaactcaaagttatacaaagataaatttaaatcttaaatcatccttaaaatgagctcatcttttgttgaaaagtttatggcagcatctatatatgaaccattgtaattgttgcagattgcgtgggatcgacatttttcggcggaggtgacgccaatctggtagaaccaatctattattatttttgacttgtttatttgtatttgaataaacaacttataagtaatcctttggataacattttttaataaattgtatgatcattaattcgttttaaggtgagctggataatgctggaataaataatttttaaatttctatgatttatttttataaaataaacgcaactataagtacactaatatatatatatatatatatattatttttaataaacaatattattattatttaactgtattttttattatgtgttgtaaaaaataatgttaagttaaatgccataattttataaatttaaaatgaaaatgaatttaaatacgaacactagctgccagcacggacgatatattgttcatatggggatccgacaaaagaaaaataataagatacaataaaagtttagaaaaaaataataagccatatttttttattttgtctttttttttttatcatatattcatatggggatccgacaaaaagaaaaataagaagacaaaataaaagtttagaaaaaagactatcaaatgataagtgacaataacatattaaacatataatctattatttaataaaaaaaaccgtaatcaatatcttacggacacaacaaatgttaaaataatttatttaaaatttcagaaaatgggttagaaagattcagagatattttgataaaaatgatatttgactatatattctaagcttacagattaattaccatttgacatgtcagagaaccaactattttaaattacgctaaagttgaacttttatttatacatggcaatgaaccaattatttcaaattgcaagttctgaaatttagtttttatttagaataatgaggacagtaaggattgattaaattcttaaccatattatatggagactccaatattatcttataaagctgattgaaaaagctttggtaaaagcacataaatggttttatttatagctttgtaagtttttagtaaaattttaatttattctagattttatatataggaaaaagaaatatatatgaaaaatataaatgagaaaattatttattttttctctcatatttttacgtttccgtgactttcattctcgttttttacggtgatactgtatgtatgtgcatgaagaaactcagagatgagttgaccagagtgctaatagaggcaaatgatggcaatgctaatgaaggaggagcaatgtcatttaacgagcttgtgaaagtgtttgcgttaaaacaagacctcaaggcatttgctttcaagaccaaagccatggtacacacaacatttactgattatttacgttgttaatataatcttttgcttgttgattactcttaggatatagtataatgtctgacatgtcattttattttatgttgatatatatgtagctgtcacagatggaacgtgaggtgcaatcagcaagaaagaaggagtcacttaattggcatatagcttcacacggtgttcctcaaagtctgcattgtctttgtttgaagttggctgaagaatacgccgtaaatgccatggcacgatctcgtctaccttctcctgaacatgtctctcgcctagttgatcccacctttcaccacattgttctcctaaccgacaacgtccttgcagcttccgtggttgtaacctccactgttgaaaattcagccaaccctggaagactagtttttcacgtcgttactgacaagaaaacttatactccaatgcatacttggtttgccatcaactctattaactcagcagttgtacaagttagagggttacaccactatgattggtctaaagaagtgaacgctggtgttagagagatgcaggaaacaaatcagttaatttggaagcactacgacaacaactataaagaaaaggagcttgaccatagtgaagagcagaacagatattttcaagctttaaggcccagcagcctttccttgttgaatcatcttcgcatctatatccctgaggtaatacatgttagttttttctttattctttagctagccctaatgctaagattgatcaaggttttaaaaaatagtaggcaaccacaatttcaaagttggaaggtttttgtggtgtttgcaactgcaatgcgattacaatcatgactgcattagttcgcaatttcctgtgggagcaatgctaataatagtctctgttactatttttctaatattttctttataattgcctgaaatttattgacatttttttttttttttttgagtttaacgtttcatttaataactccctttcatgatttagaaataagactccccaaaattgataattattccacttttcctgtaatatcaaggaactcaacgaaactataggactgtaatttaaaaccttgaataagattttagtaataattaacaagacgaatgctcagtaataattcatgattgtttcataatctgattttttgtggaccatcacagctgtttccagatctaaacaaggtagtattgctggatgatgatgttgtagtacaacatgacatatcttctttgtgggaactagatattaatggcaaagtcagtggttcagtgttcaagtcatggtgtgagaacagttgctgccctggaaacaaatacgtcagctttttgaatttttcacatcctatcatatcatccaactttgatggtgataagtgtgcatggctctttggcgtgaatatatttgatcttgaagcttggaggagatcaaatattactaagacctatcatcaatggttgaaacttgtaagtatattttgatgaacataaggaagttattaggcaactgcatttctatttaaaatgtgttttgacaaatttccatatgcttcaaaatggtactagctagcaagataatcctttaacttcacatttttacttcttaattcggttgtctcatcattcttaatgaacatcaacacgagtgatttgaaatgttcattaaatcttttattagtttgtatggactatgagaaatatcaagcaagtattataatgtcttagttaaataatccatggacactaatgcgctactgctagacacctaaagagaaatagagatataagagaaaaatgtgtagatatgtgatgcatgtggtatatcagtgacaagactgataaaaaaaaattaatattgttatcactttatttatatatatatatatatatatatatatatatatatttcggtcttgattaaaacatacttcttatttattaaaaaaattaattaactcattaaattatgttatttttaattaaaaaataaatatttttaaaaattattttttattgaaacataatattaaacatgaaaaatatgaaagatattttagagataatcttattaaataagacacatataattaaaatttgtttatatttgaaataaaaaaaataaagaatttgtattgcttgtatttaagatcctagtaagtatatacattatgtaggtgtgcatctatcattagtcatcttataattgagagagagaaatattaattgcccactatattcaattctttatcatggagggtgctgttttcttctgtcttgtgaattctgatgatcatactaattaactgcatgtatacttgtatgatttgaaatttgacatagaacgtccagtccgggttgacattatggaatcctggagtgcttccacctgccttgattgcttttgcgggtcaagtgcaccccatagattcatcatggttcgtcactgatttgggttatcgccatcgatcagaagaaattagcaatagcatagagagtgtggaagctgctgctattgttcatttcaacggcccagcaaagccgtggcttgaaattggcttacctgaggttcgaattttatggactagatatgtaaatttctccgataagtttattagcaaatgtaggattatagtgtgaagagacaaagttattccacctccaatatggagatagaatgataccgtatgggataagaggaaagaatgtcttgccttcagtctctgacttacggtaatgctccctgcatgtccatatataaatatatagcaaatagatgaagcaagtatacaatacgtaccctgttagaagaagctagcagtagctctacagtttaagagtatgaagatataagcatcataatccagtagtctagtaaattattttgtttttcaaaatggagatattgtttcacttgaacagcatttgtatcttgttaattttggattttagatccttacttgcattgaatgttacagttaaattaagggttaacaaatctccttacatattattaacccttttcagtatgattatttttaattttctagattgattctaggtatatagatgcaaaatcaattgatatagaaagcaggtgtttttaagaaggattaattctaatagtaaccgattttataaaagagtattttacattagtatacttaattagggtctgtccccaacaatttacaagtgtggctaaagtaaaatttgagagaattttgttcactttatacgtgagagctataatgttggagcctttatatatatatgcgtgactttttttcttttataaaaattaaaagtatattttgttttatcaatcaaaatttaagttttagttattttattctcaaatcaaccctaattatatttctctttaaattaattatagctgttgaataattaatatgaacgagaattaatccttcctttactttaactgcatctatataaatggatccaattattttcatgaacactagcactatatattttttatatttaattgaaatttaaataaaaataatagcaatataaattccaacgtatttaataagaggaactataaaataaaaacaaaaattaatatgcccgtagaagacactgatcaatatttaatttattttatatttgtaatatgtatctagtaataatgttttaatggtgaccgtcttaaaaaataaaattgcttttggaattagtaattttttttagctttctaggtaataaaagttaattttagatgtatataccacataattttagacatatatttacaattttatcttataaatgatttttttaagactaaattttctaaattaacttttgaaaatttatttctaaataaaaataattcttttaacatcaattatataaagtaattgtactaaaagttaaatgcgggaggagattttgagtcaaaaggccctaacagaatttgacgtgtgaatctttataattatgtttttgaaataagacttcctagaaaaaacacttcaacaccaaacttttaaaataatttttacccattcacttttttggttatgatgggtgacaagtaacaaaattataattcaattaaaataagagatgagaaaagagtatgacatcataatgagtgaaaagaattttactaattaagtgaaagaaagtacaacatttctctctccgaacacaagaaaagcacattgacactaccaaagaggaaaatactactactaaaagaacggagaaactattttttttcatatttttcttctctaagtagactatataaataaaggaagaagagaaatgattttgggatgtgaacaaagggtccaccaagccttcttttatggctttggagtgcaagctaaaagcaaagctcaccatgtgggactttgtccctaacagtttatttatattatagtaccatttatcttataacatttattgtttttctatctctctttcttgtataaattttttgtcaaaatttgatatatgataacattaatcttatataaactttgaggctacaaacctttcaaaaaggaggcaaaggaacctgcacaattgattggtacaatttcactgtgactccaacctggacaacaaggaacagaccccggtaacaaatgttgccgagtttggtcactatatatactgcaagaaaccgaggattttggaagtaaaactgcttaaagatttaggacaacagggattactacttaatgcaatttctgtatgtaagctggagggaatggacaggtctactatgtgattttttctctcacgtgaatgggtatattcttaagttatgttgaaatcatgcagccgaagagcttatacctaaaacacgtacctatttggataatttttctggtaattataagagaaaaaataataagtaaaaatgaaataaacattatacacaaattaaaattaacttatatataatgttttgacaaaggttacatataagttaaaattaattttttaaagaagttaaaaaaaaaagaacttactaattttcacctagggtgaattgaagttcgtttaagtttactttcttattttcatttctagaagtgtttataaggaaatctatccgaacaatttattatggattgcgggcctaataatagaatgtggttaggctcgttaatgttttaagtttaggtatcatgttctcctaaaagtctaaacttaataaactcaaacatttctaacttattcactttgattttttattttttattttactcaacgtaagacttgcaacacaatcaaatacaatagttgtgttattcctcatatgcttgagaatcagaagcaacccactgatctagcttaatcctcctctttgttgtccaactttgaagttttaagcctgacttcttcaaaacaaggattttttccccaactagcggagagtgatcacggcatatgaaaaaaaaatgcaattattcaggcttttcgtatattcagaattatataattggggggaatataatggagaaattatatatgatgaataatgcggacgcccaattaacttttactcctcgataggtatagtgttcatattgaaataagcatttataacataaaaatacaatatgccaggactgaatagaaactatatatattgaaagatacataaacaatatcatatgatgtattggtacaagtgctgattagcttttgtcttgttctccgttgtaagaactttagcaaaggaatttctaagggcactttcattcacgaaacataggacgatgtaagggctcccacaccacttgaaaggctgtggcataatttcaaatcacttatcagctgcatccaaaggtgagaatttaaggaagtgagaaacatatcaaaatggttttgccatggggaatcatctgtcaaaatcatgaacttatggatttgtatataaaaaacacggcataaaaggttaatacatctctttctaccaagtcatattatttattatttatacttgtctctaactttttctctttatattgcttaaaaaaaaactttttctctttatatttaactatagatattaccatattggtgtccactcatcttttttctattaaaaaatttcatatacaagaaaagactaaatccaaaagagagaaacagtattaagaaagaaaattaaaaaaacccacctgcccagaaaagaaaacaaggtcatatacaaaaaaaggaaaagggatttcaaaaaaagacttgagtaggagctatgatctttgaatctcgatcaaatgtgaaatttaccctggttgactattgaaaacaagttatagcttggctatgccatttggattggggagatgctgaataacaaatcctacattgatgacttaaaaacaagtaaaatgatatatatgtaagtcgaactatttcttatgttccaatgcacgttgaaccacaattttactgagagaaagctttggcgttcaaactgctaaagggcaatacaaacacagcctgagccatttaagttgaacgtccactaaccactttcccacattaaaacccatgttgttagtagccatttaaaaatcttatgtaatgcatatacggttgcatgcatataaaggattggtacaatgttgaaagcaattaagttgtttgtttcattggtcattggccctcgagcttgttttagttttcatcaattaataattattaaaagggcattcaataacaacaacttgtaattaacagtggaagatgagtgtacttacacaagttgaagagcagtttggtcttgacgtgaatattgattactggaatctatgagattaacagggaagaaattgcggtcatatgattgtgaaggtatggttgactcgcacacatttcccggtatcatatcctgttgccgttgttgtgatctctcgtgttcagctatctacatgcatgcatcatccaccaactatatattattaattatcattcatctcaacatacactttatatatagagtcttggagggaattaagagatgatcaccttagctctcagaaaattattatggttttgcagctctatttcctgcattttttcagcaagtataatgttcatgttagaaaaaatataaatatcaggcataaatttgcaaggttttataattcccttcgtacgaagcaatcaagccatttttactttatttttcacgaatattggaatttcttctgggtttatcccgtttcagtttcatattcttggtcctattaattgaaaatatgcatttggtttcaatatcgtaaaactttgatatattttctttagatactatatatatgcatatacatacatacatacatatatatatatatatatatatatatatatgtatgaagcaaataaattaagcagaaactaatagcatcgaaggaaatgatgagtacccgcttttgcatgaactcgatatcggcaaacaaagtttcatgctgaaagaattggagtgcgtagttagtccaaaggaatagagacattctaacttggaattttcaaaatactaactgaaattatcttaattagttgctagtttttgactaacttcttgcatatctacataaattcacaatgcctatatatttagaagcttaagatgcttcgtgctgataatataatacctttctggatctaactctgcttaaacctttctccagtctactttccaggttctttaattcctttagactcagagagctaagagcttcaccaaggatgtgcctggaatgcaaaaaatcacattgaattttttcatttcaatggagaagtctgatgaataatatttttaagagaatggaacattgacctgtttagattctgaatgtctctgatttgtctttttaatttggacgcttcctgctgataaaactggtattgataaatagtgtcaaccagttagagaaaccttgtggaggagcattatgatatagcaattaatttagtgataggagaattaaaatttaactagaacgcagaataaggtatatataaaacaaataattcatttttcagtgtgatgatttgaattatgtgttgagaaacatgcatgatacagtctatagagctcaagtgaagagagaacatgaacacgagagatattaacaaaataatgtgtattattgatatatcatgagagagaaaagtaacataattatatatatatatatatatatatatatatatatatataactgaaggagcaactaactaatttaactgttatcttgttgagctaatagataactgatttctaactgtttcaacctgtatatattgtaaaaaataggttaaatttcgacaaatcatcctaaactcatgaaaataggttgagttgcattatgcaattaaatgttaaatttacataacttgttaactcaatgggtcaaaaggtggattcttttgtgaattattttgttggaattttattggacataattttattatttttttttctaatgatattagtatgatattaatttttcaagaattatgaatatatataaattaagtggatatttttttctttctaatataatttatttcatatctaaaaatattatgaatcatttagttaagaaacataatcggtaatacttataccaataagtgttgattttattgaactattatttattttgttgctttactttatattttttcatgatgataaattttaaacaacatttatactaagactatttagtaagatagtattattatgataatgacaatatatttagatttttttaaagtatttatttgttttatttattggataagtctgagttaaatattatatatataatatttatatatttaaaaacaattatggctaattcaatccaacccataatgcactaagattgggctggatcgattgtgattttcatcccattcttaaaatttgtccaatccatttttaattttatgagttgagagcgcagattaaattggattgaattggtttgatccattttaacattgtctcgtgtgggactcatcatacctctcaataccaaactgtcaaatattggtgaagatgtcccttgaacatttgaactcgtaaatgtcacattcaaaactaagcattagactattagagtatcctaatgataaaggattttagtggctttgagaagattgcagcttgaaataattaaccttcacgtacgctgtaattctattaagaaaaatatgccgtaattttaaaacaacatttattctggaccaaattaaccaaacaagagcattttctatcatttctttgatttttttttttagcttactaaatttacctgtgtattagcttcagagacagattctgcatttgtggaagcagcacatgctttcttgtacctatcgatagttcctctaacactgcaaaacaatacaacaaatagaaacataaaaatgtgataaagtacatgctaattttaccaaaacacgtacacggtgtcgacttaatctgtagtttacaaattaattatgaactcatcttctttgacattaaattcttaggccaaaaagctttgagattgtaataaaaatgggtgtatatttataatttagcaaaatatgtttttaatttctataaaattagtaattttgatttttgtccttataattttatttttaattttcatcctgcaaaaagttaaaattttatttttgatctctattattgtgtgacattcgttaatagcttatgtgttcagcggaatgtcaagtgaccgtcccaggtaacaacagctagtgtctatatatatggtacaatgttaacatgtaatatcttaaaaaggatttctagagattaaaataaaaaaatatatatgttttatagggaccaaaattaagatttattcatatttaaaggggaaaaatcaataattttaaattttaaagggatggaaagcaaagaaaaaaaattataagaaccaaataacatgctaattttataggaactaaaaacatatttaagccttataatttttaatttcaatgtccattggaatctatgaaattgacaaattacattacatctattgcatgcaagagaaatgctaggaacaaattatctaacacattctttgttattgattgaaaattattataaattataaaattctgtgcatcttcttatctagtgaatcttacccataattataattaatattaaaaaaatgttattaatatttctctttcatataaatagctcagtgacctcttgctttaatttctttgtttaccttacagtgttaggccctatccaaattttttctattaagaacacaaaaattaacaagctagttgattgagtatggttaaatacacgaagtttcattcttttgatcttaaagaatggtaaaccccatctgtctgaacttctctaaagttcaaatacaaagtggttatttactgagtatgcaggaagaggtcgatgttgcatcagtgggccggtgtaagtttaactttctctttaattgaaatgtccaaaacacatatataatggagagaataggtaaagaattgacgtcaggaatgggaagctttattccacaaagatgaaagcaataaaaacatatgggaaagagaactaatttgcctttagccattcttagaatctgctatcatcatgttacttttagctacttagggtaaagaaatcagaagcgggaataataatatctaaacactatgatatattttcttaagaaatataggagatgaggatgagaaaatgaggttgtagtttctcataaaaattgtttctctacacttctaaaaatatttatttctcctaaaagttgtttctctacacttcataattttctagttttatgcacaaaatcaaattaattcttacacgtttgccttttcatcttaattcatttgttttttgttttttgttttacgtacccaaaagaaattcaagttatttaaagtaaaatcaccaaataataccctatgggctgggaaacgccctaaccatattagactttcctccattatgtaaaggacaaaatttacgaaaatgggaaacaaattgggacatccataaccctcgatatacttattagtttaaattgatttactttatgctcaaaaagagtttataacgaatactttagtaagaattttaaaaaatattgaagcattatagactaaaaatgaccttaattaatcataaacaattaatcctgtgaaaattctgttgcaactttaaagaaaactgtacccattttgaatcaagagctctaatatctgatttgattgcttcttcgtgtaacctcattgtacggagataaaaatattcttaaaaagagaaactatattagtacaaattaaatttttgtatgtaataaaaatattatacaataaaaagatatatataaaaaagatgttattaaaaaaatatacaagtttactatgtgaataaaagtctgaaagggttatttaattagtttgcagtttctgcgcatttccccgtgatctatcacattagaattgaaatggtcttcctccaactttgtgtacatatgtaaaaaagaattgaagtgattgaggtgtgactaaatactaaatagtgaaaagtctgaaaccctaactcccaattggatgagatgcttgtgttgtgtcactatacattgacaaataagtggtattaaggaggagtcaagatggaaggggctcattgagtgcatgacagctttgtgcagcaacccagacccttttaagatttgatggatgacaagtggagagagaaactcaagagagagggattggtaaagcttaacaatagcagatacaccaggaagctaagatttctcacctgcaaatctttgtaaccctaactaaagctttctcttcatctgctacatacttcatattgtttcaccttaacgtctataatttctatcgcttacacagatctgcacccttcttaaaaatcactgggaagacgcgtgatagagcaacaattaagtacaagagttagaaagaatgatatatacatggtgaacctagagtattcatcggtcagaagttaaaaaaactaatttttcaaagtattaatgcttgtttaaataattagcatcttttaatagacattttttcatacatataaatgaaaaaaattaaacttttaacgacatatgattatctactaactatgcctttcagttatatatgataccacataacaaacaaaaataatcataataagaaaaatggtcttaaccccatatataaaacccttgttgtttctagatatggtttgtgttatttaaatggttcataagatatgaaatgagattgaaggagaggaaaagtactgtgttgaatcagtagtaaaagaatatttgaacctgttgttggcatactcatagaggcgtccacggcttgagaagacaacaagagcaacctcagcatcacacagaacagacaattcataagccttcttgagcaacccgttacggcgtttgcagaaggtaacttgcctattcgttgtgttctcgatccgcttgatttctattttccctcttcccgttttcttctgtgaacacccttctgatattgcttcgttgggaaactccatctatggctgcaaccagagctatctagttaaaaaatttaattagcaaaaaaaaaaaaaaaagtaaaacaccgaaagttggtatttaatttggagtatcactccattaaggatgcatgaacttaattaggagaaccaaagaagaagctttggaataaaaaggtcattaaactataagctattaagcttgtccttgatatgaagataataatcaatcaaagacagaatggaaagaaacaagggtgtgtatctagctagctaattaggttgtacctatgcaatgagaactatttgtagttctttggtgttatgtaacatgtgaggagaaaatgttgcaaaatatggaagtggggtggcctatgagacaggtatttatggacagaaaatagaccctccaactctcagtactgaaaataataatttggtagtaactccttgtgtaatgtttggaaaataaaagaaaaagggtatagtgagaaggggtttgggatttcacctgtcaactttcatgctcaatgtattaaccgttcatttttcttcatgtatgggaaaaaggtgaggggggacaatgaaagtgtctttttgaaagtgactttgttaatgagtggggtttcattcaattccaatgagagggacgtgaacgtaagtttgcacgcaaaaacttggaaagcttgaatttttgaagcatagctgcagggttgcttcttggattttgagttttggcattttatcctgctagaatctaatctagatttgtttccctccacttcagccccgtttctctttctctcatgcttgaaacctgagttttcaattgctcactcaacccaactcttgcattttttgaatttaagacaaattaagtttggattcaagttaaatgatttagaatcaccttgaaatatcaggtaacaaaattttaagtaatattcatatgtttgttttatgttaaaaaatcaattttgcatctggaattgattgaattgagaaaactttaagtgtgtggcatggtgtcagattagattctctataatgttgaaatatcatttttagttaaataaatttgtatgttttcacattaaagaattttgagttttagaattgataaaaaaaataacatccaaacataaaacatataacttcaaaatcaattttaatgatacttatcgatatacactaagtaattttgtattgaatgaaaaaatttataaagttttattactaatgtccatttagaataaaaaaacatacaaatataaattatatcattttaaaattaattttactaaatctcatctaaacacacatataatatttgaataagcatgtaaattgattttaaattaaattaattttaattaaaattattttttaaagtaaactcatttatgtttgaatttttaacaataagttaatagtaagttttatataatttttcatcagagacaaaatttatctaaaattactttaatttaaaattaattttagactaaaaaataatttatcaaatatatgtgaaatattgcgcactatatttacatcttaagtatttgaactaggtttattaatattatatttcataggtctttttgttgattttatacatatttctttccatttagatagcaacgtaatattgtgtatttttgttaatacaatgtttcttaatttacgatattatatgaattaagtcatgattaaaaaacagacaaatacttggtgtaatatcattaaattccatttccatggagtgttagtatgattcattatttttttattgcagaatttgaccaggttttatgttgacgtatttgcataggcttcaatatataccttgtattttgggtaatgggaaaatcagacttgtattctcagttgcaatttttctttcttctcgtgactttccagtaccttgttgatttaaatgacttggttaatatttaaattatcttcattaaaccttttgaatttggtgttacaatgtgttaggacacagcggtgtgacctcacatgacccttgtggagttatggtgggtacatatatagactcatcatcaggaacaaaatatatatctatgaagttaaactattgtatttgtttttgttgtttgagtgtctacttgcatgatacgagactaatctttcaattaaagattcttatttattagtgcacttctcaagtcccttcagtcgaatttcgtcattaggctcagttggagctccctttgttccatgccctcatgtatcgaccaaggaattcctgattacgagttcagcattctcctttttgcaatgcttaattgttaagcaactttaatcactcgaggatctcggaacaacagacagaatcacacactatactcttgcaaaattatctgattgattagttctgatgcaattctatataagcttgaacgattaacctaaaaaaacaattacacttaatacttgaatgtgcttgaattagatctccttttaagcaggatctagttaaaggaacaattacaaattacaatttattttttactataatataaacacatgttaggttgatgtaattaactaactattgtattatattgaagtacaaaaaaaaactaactattgtgtttaaaattaattaagaaaatttaaataatataagcttttatggagaaaaaaaagatactactaaaaaataaacgttgaagttaattacagaaaatgctaatttcataacacggttatcttcaagttttagtggcccgtttaagcccttgttttcaaatatatgaatgcagtttataaggtgtgcatgtgtaatagttaatcgaatttatttaaaataataataattattttttttcttcagattacataattagaatcaaacttatgactgattaatcgtacatgtgatgatttcatcaaaaaaatcgtacctatgatacataaagagactaacctaagttctgaaccaattaattagtcaaaccttcaagtaatagatgttgggcctaaatcccgagcataacctttacgtcaatgagctacaaattttcacactagaattgaagcatattgaaatcttttcctgtgtttaaactccttttttgtttcttcttttaactgtgtgtttctgcatttaatcaaaatttacgtgtgtcgaccgaaagttagaaattataacttctgcgtaacagactcaagttgacgtgatatttctcttgatacgtagtatatataaacatgagtgagagttttatatatcatttatgatagaaccaatatttcacactacatctgaaataaaaaccttagtcgtttattagatctattagtcgtttattagatctatatctaatatatatcttcatatgcacttaagtaattcgtttttcacttatgaaatcttcactcacttaaaatagtcgtgcatttgacatatttgatgaaatttatagagctgtcaatttgagatagtccgatctatttgtattggtcaatcaaggagcatgccaaaaaaaaatggtttagctagggcaggtcaaattaatattgagctaaaattttgtaagttcaatccaatccttgaggagaagtagtctaaatgaattgatcactaaaggtttatttgagtaagtttttttagaaatacttttaagaaaaagaaaagaaataaaaaattaatgagataaacttctttattagttaaaataagatttttattagtcaatttgtaaaaggtttttaatatatttttctaaaagatgaaaggacatttataaattaattaatgattatccaatagaaaatttattttaacttatagagaaattattttatttttttcttcttattttcttatcttataaatgttactaaaagaacttacccaaacaaattctaactcttctaaaatataattaaaaaataaaattattcaaagtaaattaacttttacaaacaaattaataacatatttttttaatcactataaactaaaataaaaatatataagttgttaattgttctataagacagcataattcaatacacaataatagaaataaaatagagtgcgtgaattaaaagcaatcattatgtgttattaggttatggagatattttagaagaagaaaaatttgttttatgacgatttttaatactcaatatcttaaaattattaacaatgttaaatctacattgaaaaaagggttagtatgaataaatttaaaatataaaagattaaaatgaatattttaaaagatgaagaaaatcaaattgaataaaaaaaagataaattaagaaccaaaagtgatatttaatctattaataatgttggttgtttggttgtgtcttttatacacagttaatcttaatatacttaagaggttggagtattggaatgcatgcatattttctttttttatacacacaagaataattaagagatgccttagcatctcatactgataaagaataacagtgtgtaatctattaattaaagccctctacaatgcagcaaatttataatagtatggttcgtcaaccatgttgatgaaatagataacgtgaacacatattctagttagaagaaatatactgggtaagacgataattatgctctataataatttgtatgttttactctcagataagacagtggtttagatgatatatatgttcgggtaattgtataagttattattaagtttaaatttttgtacataaaaatgaatttaaatatgaataaattattaaggaccaaacctggtgagaatgtttcattacaaagtaaaaataatttaattacggcggtttaaaaaatggatatactgttcatccttgctcccaaaactctattaggtatagaaatgattacatcttcattacaagctaatatatatcttcatatgcaggcagatattacaagctattagcatccttcaacgagaatatgacttcgcaaataaaattgcgcatttatcattcattatatatatatatatatatatatatatatatatatatatatcttttcatgtacatatatacaattaatatttttttattaacaataataaatgtaatcatttgatataacatttagtcgcacttaaaattcattattccttaatatattatgtaagcattaaatttatatccttctccacaatttagcttatgttgtgaattgtgctacactcaatgcatatatatacaattaatatattctcaccatttttgaattggacagtttgaaaattaaaagcacagataaaagaagtagaagaagaaaaaaaactcttcattagtttgaactactttggttagtcttactcaaatgcctttcacaaagaaaaaagaaaacgattttgcaagaccgcaccatctaattcattcactgatgaataaattaggaccctctttgcaaacaatttctgtttcagatatcaaataccatggaaaagtaaaagagccgatggaaattaatttcaataacataactaaataagcacatcgttaagatatgaatgataaaagttatctaccagtgctacttgcatttggtagtatgctatagaagtaactcaaagaaagagtaggcaatataatttgctcaaagaaaataagcatagtaattaattatctatatttcccaacttttcttctgtctgcctgctgccattgattcgtgagtataagatgatcgaaaatgtatcatcaaatttgtctcatgtaaaatccactgaagatgcggaccagacaaaggaaatctttctcaattcctaatgccctatgtattttatcaaatgcaatgagttccttcttttttttctcataaaaaaattagattaattaaggaaaaacgcatctccttaattgccaaagactatattaatgtcagcgagaatttatactaaaatttacacatccttttttttatcagccaaaggaaaaatttattattatactaaaagggtaccagtggtaccttccaaacagaaccatgcaaccataaagaaaactgtacatgtcttaagacctgttaaactacaattccttttatttcacaaaaaaaaaaaaaaagacctgttaaactacaaccatacacatcgcttactaataaaaatctgatgatcgaactcaaatcacaatagtgtgaacgaaacactcgagtagaagttttggtaatgcaataatgagtttcttttaggtacaatgtaaactaatattgtattgcgggaacgcctatagcttgccagtaactagtgccatctaataatttcataggcatgcatattcatcgatttagttagctgcagtgtgaatggtccctagccattatttagatttcattctctagcaacatatatttaattctataccattgttttgttgaaccttacaaattcaaatttccccatgcatatgccatctgttctgaacaatttaatgccaatattaaggctacattctatgtcctagcctcctacgtacgtgacctaacatcataaaaggaaatttgaatccttgaagtttcttctttaaggaccacgttgttctaacatggaaagggttttgataataacccattgataagtgcaattattccttcatacctactcataatcatggtgtctgaaatttgggcatacaatcatctttttcttgacaacttctgatcgatcacatgagagctaattaaagttagttgttatgcatttatatgaccattcaacacttacaactacgacaattaacaggtatttcccagagaaaaataatttccaatacttgctaatataaatcagaaggtctatgaaagcataaacacttggtgattaaattagttagaaggtaagaccatgcacgcagtagtttttaacgtgaaaaattaccccaagtattttatcatgttagctacgagcaagtaataatgtttgataaagtaaattaacatttggtatcccttacgactgaattagtgataagctaggaaaagaagaaagataaataattagtgataagatgtgacaaaaatgagagacgcttgaatatagtgggtgtctaaacataaacaacaatagtatttacgcctttctctctgttctctaattttctttttaggtgtcaattatgactcaagtctccagggatatttttccgaccaagtattatcttttatggattgatgacgacatgaaaaccaattctttatactcgcattagaaaaagaaaaaagatcaggatcaaggatttttttgaggtgggacagagtgaagaatgtaggacaagaacaaggattgaaacacatacacgtcatttctacacttcgactatgattgctgagaatctttcatgtgctgaaaatggtttacttgcgttgaacactgattcttagagatgctagttatttccttgcaaagcctcacattatttcagtaaccatccatacattgtattggatgtataccaaaatcttgcttcaatgtgaatggggaatgtagttgactcaaatgcctttgacaattttctggccaaaaaactagttacttcttgtacgttgaataatacattcaacaaactgctcaccaaataagaagttaatggacagagccacagaggaataatttgatcatcatcggtaaattttatcacacaattttttttaaagtcagcgcttacggagtagattcaatcttaatgatgattgtggatttttaaatttaagacaattgaggattgaacatgctagatatgctgcctcaatacaattatacaagttttgccagaaatgaggttgttgcttttatttgactatttgagtacaccaaaaaacttgaacttcttttacaaatttcatcatgcatatatagttgcagcaggacaatgataattgagcaggctacttctaagtggattacaaataagttagaatcgactaaaaggactaaaattgtaacactcttatcgaatcacatcaaaatgagatagatccaaatgttgtgcatatgagattatacagctgatgatgacttaaagaaattaattgatattgtctataccaacaagatatatttatttttcagtaatttgtcatttaagaatttcacagttaaacgtgtttgacttgaaatagttatgaaagaaatgacattttaagaagtttttcggaaaacgttgtagtgaggacaaagcatgcagaaaaatcttatgttgatttatagggacaatcattaatcctcaaagcaatcaaaacaaattatcgaagtttcggaaagaactacacacggaaggttataaccaatggagtgttatggtgtctaagctgctgccgagaaatccacaattaaaaatattataataacaaatacaagtaaaacatgtaactagtggactacttactattcaaatataagaacagtaaaatcctatgatgataataatagaagtaatagaactgagagaaccatatcactgaaggttctaagagaggatatatagtagggaaaaactttggaactatcgatgaaagttagtaaaatggaaacggggcacaacaataaaattgtatcccgaacagaagaggcacatatgcgtctgataagcccaatggagaaaacaaagttgacaaagaaaaataggataatatgttaagaatggctagtaaaagtaagtcagaaaaaaatgctttacccgaattcttccaattgccctacatcgtctactccggtaattcatagtcatgccaatgaatacatgatgtatggaccacaccacaacagcaatattgtgatcatagttaacagctgtgatttgtgaagcacaagtcaaaattcctaaaacactagtagccaattgatgattgattaggtgagggaccacgactcaaaaatacaacgtaaggagttgaagcaggagaattaattaattgttgaaaatctcattacaaagaaatcaacactctggcatgggtggaatgattttgtaggaaacaaaaaaaatgtgtaccgtgtacgtgcgagacgaaacaacttgttaacgtcatttaaatattatccttttgcatttgctttgaattgattgaccatggaattagttgggggtatacttgcaacattgcaaccctcattcttctttctttttgttggttgggatcataaaaggaaaggaaaataaataactttttctatccaatccctcatttttttctttgtgtagcttatcgtcattggtcacgaccaaagatattttcgtgatctttaaaaaaaaaatcaattaatcaaccttaataggatatgtttgactgtcaacacggaaagatccataataatctacaaatcaaactacatacaacgaacaaatttgtattgacaaattttgctctatttctaatgttctatggatacacacaacaaaaatgatttattaaaaatataccagtataatttactattaaatttatatgtttatcaaataatttcaagaaacggaaataaacttcttttatcttcataatacttgtttgatatttaaatatttaaacaatactccatctggtccttgttactataaaacattttggacatcaattatacaaaccaataaaattaattaattcaattgattctattgaatttatataaaaaaaaatactactaatgtgtcaattatgtccttattaacaatcattaacttgttatgggtgatgtgaaaagactaaaatgctagagtattataaatcactatcaataaaaaacataaatacttaaaagacaaatattaaacatatgtctttggaatattggttaaaaaactaaaataaaataaaatgatatcctatgttttacgtaataaatacttactcattttaatttattaatcaatgttacaagaacactaattaacaagactcataattagaatatttgataagatcaaccaatgaaagaaaaattaaatattttataaaaattctaaaatctcttataaaaagtatcattcattttttcttaaagtatctcttatgataaggagtagagtgagtaaaattgatgtgaattaaatgtgttggctaaagggcttcttttgcattgtttataagagtatgggctagatttaagtggcccaataatattatgctctgaaaccaaaaaatggaggcccaataatgagcaggttttcaaccatgctgcaacccttacttcaagatgcactcttcgtaagtccttacttttttattctgcttcatcccctgtgtttgctccttgtttttcataaaagccttcagtatatagctattgagctctcttttttttctgatgaaaaaattgcgctttataatagtcaatctgaagttgtgaaatttcacatattaattaagctttgtgtaaatcggtaggccaaagtatgcattgcattcattatgtcatggatagatcccctaacatttttattgacatgatatatatggtgggagggaatccacttatatatagagagagtggggaaggaaaaaggagatatcaagttattataaaaataattttaaaagaattattttttattctaatcatttagtttcttaaaatctaataattattataactctaaaaaatttactcctatattccatgttgatgaggtgatttttgcatggtgaagtagtaattaacttgctttggtttcattcatgtgctgaaaaccaaactagtggaccgttctttgcttggtggattaaggaataacaacttctatggtttattaacatcgcatgagatagcatccagcaatttcttatctcaggtcagtttatgaattatggcaatatcatagttgtgaaaattgtgatcatgagtgatatttttaaggacaatacttgtcaagttttttaggtgttttacttttttatgctgtcattcaattagaatcagtttcacttccgtaatctactagtagtaagttttgcattaaaggattacacggattatcaagataaaactccaattctaatgggagaacagtgcatcgcgaacaatatctaaggaactatatatgtaagttttgtcctattttcaatgacatgttatttatttttcttacctttgctaaacttagtcatttgaagttgtagacaaccttgtaatgcaaagatgccagacatggattaatgactgactgactaatgaaaaaaattgttttgctttagcagcaacagcaacgcaagttcatacagatgggaacggttctgaaggtggttgataactcatgagcgatgtgcattcaagaattgaaagggaagaagagggcaaggttaggtgacaccataataacatcagtgaaggaggcacatccgaatggaaaagtgaagaaagaaaaggtagtgtatggtgtggttgtgcgtgcggccatgcatgcaaaaggggaaggtgtgatgaaagtgaggtcaagtttgatgacaatgctgtggtgcttgtggacaagcaaggccaacccatcgggactagagtttttgggcagaagaagcatgtcaagattcttaattactttggctggccatattgcttgaatcagcttagattttcttaattttggaatcaccgcttcacttttttctgattgaatcttttggaatttgtgtgtgtaaaatgtactaactgtaacttgtattgatcgggctctattaggcaaaagagaaaaacgggagtgtacaattcatgtcatcactttagggaaaagagaaaaacagatgtattggaatttttacccttgaaataacaagtagcaagtagcaagcaaatgggatacaatattatgttcatgattgcatttgagaaaatttttttcatagatgtataggtgtgttattttccttttagtgatattaaatcgtcttgcctgattctatacgaagttaattttgtaaaattagagtcaatccgatgatcaaatgatcagtgcctaatctttgtttttttaatggaaccgtgagtggataaaaattactaataacgtattaactttattcaaacatgaaatttcaatacactttaactttttttctccctttttttcttatctatatagaaaatgttttacatagatacaagttgttgggatcatttatgacaaaagtccaatacccttgctctattacagaatttttttgttatgaatttgataaattcaattattaaaaattcatatatatacaatattatagtatttatttatatttaaaaaaaatattatagtttaaatgaaattttttgattaagtattagttcatttttaaattgtgcaattttttttataaacttgacgtgtttaataagatcaatttataataatgaaattagcattcaaaaagaggtattgaatgcaataagctggaaaccataccaaaaaaataaaataaaaaatcatgataccgtgaaagaatttaattctgaccattattaaaatggattatcaagattaaatttaagtcaaataatcctaaccacctactatatatttatggtcaacatgttacctctcatttctcactttcccattagatagttgtatatattttttaatagaagataattttcgtataatgataataatgaaatttgaatttgtcaccttctacaaattattcaaactccttttcactaacaagatctagtgactcaaagcactttcttgatatcgttcaatcttattttaacattttatttgtttgcttgaaatcttattttaacatttgacgtactatattaataaaccgaagagatagcaaattgtattaaataatgtgacaggacaacattaagtacaagcacaaaacttttttatactgacattacactaaagaggaaattaaaatcatgtatacatagacacatatttcagaaaattaagaagaagagagaaaaagtagattctctcgggaccctaatactattaatgtagggtttcaattaaattgaatttgatgggtactattttgttctatatactaaaggcttaaggccgtagtagtagaactttttacgcaactctaccgagactgggaaaaacaattgaaagggtaggcaccttggtaacatttaatgccacaatgacaaaagcttagagctcaaaaggtaatacgataactctcgaatatgcaccaaaggcacatgaaatcccaaagttttggcatccttatattcccctcccgttttgttacacatatagtataccttaatctttatggtctctttcctctcttgagagaaaaagaagacttttgggtcattccacaaacattcctttcctttccttcattcacctgctactacactaaatatatacatatttgcatgcatcaacaataccacccatattccttcaaatcttcttaaaacttgaatttccccaccaggaaatatctgaatatcgcagtttctacatcatgggtgtccttggaacaatggcaagacatttggacacaataatagggtgaacaaattaatctctctccattaatttgcttttaaaaatatctgtaatttgtgtcgtatatatattttatttcattccactcctacacatgcattgctatattatatctgcgccttacagaatatatacttttcacacaatacctgctaaatcccatgtacaatactcatttaataaaaaaatattcaccataatatgtattctgcaatttaacacacaactgtaactataggtttttcattttatggttttccccgtaataattaacagccttttttttttgttttctgcatgccaggcctggagtgatgcttctttatcctctgtaagtatagtaaatgccatatcatattatcatgcaatcgtgtatcattattttctcttcctccggattaactgctgtaattcttaattaacaatcaataaaaagaaattaaagcatcctacgcagaggcatgcatgcacattatcttatctgtattaattatttcatgatatgactaatcatcaaattcttgactacttctgagtaaatatcatagatacgcatcaatgagagcaattgaaagtccttcaaccttggatgatcaacagtggctaacgtattgggttttatactccttcatgaccctctttgagctttccactcataagatccttgcttggtacgttgacatcaatttcaagtcaaatcaaactatatatatagggcacataatagtaatttaatatttgaactttggcataaaaatatatacaggtttcccatttggggatacctgaagcttatgttttgcgtctggttggtacttccaatgttcaatggagcggcttacatatatgagaattacgtgaggcaatacataaagaatattggaagttccaattattctgaggagtacaagaaggtccttcacatgatgaccttcgatgcaaggaaagcagttgaacgctataacgatagatatggccctgatgcctttgatagagtagtcagagcggtatgatacaaaacaactatgaattgcttcatcgtaaagctcatctatatatctgtgtttttaacaattttttgttaactttcatatgtgcaggctgaaaaagaagcaaagaagcgatgagtgagggactatcaatttgaccaagttggaatgaaacgaacgtcaacattgtgaaatcgatacttctttctttgtatattttaacatgaaggagacggaggaatctattgtttaattaaactaaatggcagcgattatatccttcatatattttatgtgtaccttccatggtttaagaatgtacgtaagagcattcgatctagtttgatatagtcattttctgatttagttaagaaacaaaaattatttggttaaattacctcagtttttcgctaaatcctttaaaccctttaacgagaattctactgcaagttactaattggtttcctctaagttccttcagcataactattaactacacgtacccacaaactcatgcttaattgggataaaaataatggaaaagcttgacgatctcaaaaaccataatgctttcataagcaacctttattgggtaatactcatcttcaaacaaagcaacgtacgtaatagtcattatgtataaattaaagtggcggaaacccaatcttataatagaataaaaccagttcgatcaacctttttccttcaacactttggcatacactatatagtaacttttttatgcatatacactatattgtaactttttttatgcatatacactatatagtaactgatactgtgttgaatgaaggtttttaacagataataattaaaatcaggaagaaaacaaaaattgaaacataaaatcatgcactcgtatgatgaattatcctagactcttccgattttatatgtggaaacattctaaaacgtaacaactttaccccctccttattttcacttttcatacagagatgctgttggttattattttctattacttattagcatcacttccacctcggcaatacataattaagtttaaaatacaaaaaagtttggccgatacaatacttggagaagtatgatctacaagacagagaatcaaacaggaggatcgactgcaatactttgcctactaacttttttgttggattttgataaaattttgtgtttatttcgtgttgcattaataaaataataagcgttagtgtaccggcaattaaagaatatctgacacatcattagctcattttgactcaaatgaatatgaaatccgtttaaatttaataaattcatcaatgtaacatctccttagtaattgaccttggaataaattagtcaaattgatttatttaatatattaaaacaattacaaaaacgtaattcagtttaaattctctcacaacttaagacatgaatgcaaatttaaactatttttccatcaaaagcaacttcactggattaaccttttatattcaagcagcttgtaatcatattttttttagaagtttttaaatgaaaaataataattttttcataaataatcaaagccggtatggtagaatttttttttcttcataatttgccagttcaaattaatgaggaagtatccaatggttaatgaataactaaagccccaaattcaagttttattgaataggttaagagagatggactattcccttatcctaaagcccatctttctttcctttctggtgtatcagtaataagcacatctttgcatagtcattgaacagatgccatgtggggaatacctggctcaaaaatagatatccaaagcgtcattattcattggagacaaaattctgtaaagggcataaacttcaaaactgagagctggatgtatcgaaagactggatggaattatatcaatttttccaccggtttcagcaacctggcaatattgatacatggacaatcctgttatgttctcaaatggatatatactatggaggaggaaaagcagatatgataaaatgatataacttacacctaaaatcagtatactttagtcaattttctctgaatttctatatcactaacactgtcagtaatcgcaggtgagaatatggcagaatagcttgtcatcctgatccatattttaagaggaatttaagatgtgcttcgctcttttaggaccaagtcggacaggacctgatgttaccatgccgtccagtttaaaagaatttacagcaggataacttccaggatttagattttgtgcctcatgctgacaacacctactcctagcactgcccatgtgcggatccagttcaagtgctcttgtgtttcgttgcaattccacgcttgacttttctccaggcaacctagtcatacgactgaagttttcttgcactcgtatattcggtaacttggtaggttttctggaatcatcaagattggctgcagctgcaggtctctttctggtatttgtgcacagctgatggtcatcaaacttcaatctgtcagcgaccttatttatgtttatattaccactatttatggtagagggtgtaaccggaacatgtagtggatgaccaattgatactggagaaagaggagtcgtctgcatgggacctagagaagaagtcagatgattagaaggaaagcgaacttctgctgaatgattcacaaatggcgtagtgaaattatttccccacagattttgaggaaaattttgactacttgaagcagaaaattgccgagaaaagatccctggtagcatttcatctgttgagattgacaaccacgatggtgaacttctgtagggactatcaaaccaagatgttttggcctgttcattcacagttggctgcaagaaaggaaatcctccaaaggctgattttgtaacatggggatttttgttcctgtcattcagctcaccattggctacatgagtcgagtgactaaaattgccagttcctagaggtttagctccaggtataaactgctctgaaaagtcattggatgcaccattaaatactgcataagtagacttttgagtaatgggattgaaataagaactggcattgaagttgactccatgattactttgccgaccaataaactgttgagagaatccagagtctgtactgctcatcaatatggtgccttgtgctgcttgattgctttgaatttttgctgcttgcaatacattgtcagctgatatttgtataggtgaaccagatacccattcctgcttagaacttctttccaataaagagtgatctaaagcagcatattcagaataattccttcttctggattcctcatcaggccaaacatctgcaaattgttgcatctcttggctgcttctaccaattggaacatctttacccatcaacctcattgttagttggctggaacttggtgagatatgatctgaaccttctttcagagaaatcaccccatttccattgtgattccagacccggtcacattgattctgttcaatgaacgagtttttcttacagttcaactctgaattaagtggcgggacatagtgactggaacacatatctgaagaattaggtcggttgatatcttctctctctctagattgtaactcagtgacaggtaattgggttggatgatgaggaaatggattaagactatcttttggaaatgtcttctgaacaacatgattctcattaatgcttaaattttcctggttactttgatggagaatattattaatgggtaagccactaaaagaaccacgtaacgtacttgatgtatctgactggttcatccctaagtttccacttgaactgaaattgattaggtcaccatgagaattgagtggcaaaccaaaaaaatccggatccaaacagctatttttgccacttcctttctcccagcctgtattggggaatgagttatcaatcatatctgcagaaaacatacgagaaaattgcctacccaaggcctcgccactgttatctttatctccataagtttgcaatggagattctggtttttcatttgcattatatgaagcagaataagatgaagaaggctccagaaatgtctttgtattttcatttgagttaacagcatcaacctgtggatcatccaagtggttgaacttcccactgtagctgaaagatccagattcacacatctgtgtatttataccagacatctgctcttcttggactgctgaaagaggtctagaaatgtcagcatacggagaacaatgcagggtatttctgttccctcggtaaaaaaactgtgaatcattattgtcacaaactgccaccttagtcaacaattctgacttctcttctaactgttttgacttctcttgattgatacatggcttcaagaagctttgtacggtatcttggtccagagtgttagaaaactgtttactttcaactatagggcaaacctcctctctcttgcctctgtcaatatggtcataatttctgtttggctccaaacttgcagtttcttcatcacttccagaagacttctcctttactactgaagatgccaccgcatctgaagatatctttaacatggtttcatcaaatgaatttgtcttttttggaccaagtatatcatctttgccagagaatttcacatgtctgtccaaggttgcctcttgatcattataatagctttcttgagcaccatctccaatactactgccacttgacgtcttttcagaaacatgtttgaagcggttcttaagaatgccatgaaaaggagatactgctttttcttgctttccaactgagtcccagtttttaacttgttgcttcttttttaccgataagcaatttatacctgatttctttctatcgatagaaggatcaacctcatgaagtggaagcattttattaccgattgtaccttttagttttctggaactgtttactgcacttcgcaccatgcgctcgtaaacatcatcctgagatagacaagattaataaaattatgaatgttatattataataaaataagaataagccgactaacctttaggatatgcaaaatatgaagataaatataataacacctcttgtagcctgtagcttttatatctttctcctttcttttcttttttatggatgtcatgttgtagtttttacaagaaaataaacaaaattacaacagtttcatgtataatgatgccaaaatgtctgcttatgaaacagacactgtagaaaattagcatttcatatcctttcaacaattccaatcggaaatagtgaaaggatttcaattgtctatgactgttgctacattacaatttacaataacttgatgtccaaagatgaatgtcccgaaaagtttactcagaccattggtttttcagttttttttataattcttgtccctcatcaaaaagctttttgtaaaagattgaggcaacttcgttcatgcctatatcttgtgtctacataagataaaacggcaaagacgttttcaaatggaatttatggtcaagtaaaagtagatttaatacaaaagaacaatttcaccatggaaagtttcagggaactatacaaactatatttccagcgttaattataaaatcacgatccaaacttctggataaacaaactctttgattattaagtgaaatttttttaattttctataattaggaaaagactttagtgacatttgaataacactttaattggggttttgagtactccatcattcatttaaaaacaaatcaaattgaaatacattaagatcaactacatgtagaagtttataaaattgaaacaattgaattaagaacgaaattatatcattattttatcatgataagaaatttcagaaacgcttaaaacaaaattcttaaacttggtcattttagtatcaattttcagaaaagggaaacatagaaatctatatatgtatatatcataaatgcgtagatcatatatttaagtagccataaaataaacttaggtactaagaaaaacaattgaaattttttgtaatcaatacatcccagaaatgctcgtagttaataaatacaaggttatttgagcttatatattctggtacaaatatactactatttttaaatctttacgagtgaatatacatgaaataaccatatatcaagctagatgaatgtataattatatatatgaatatcagcatgaagaatgcatgagagcttcaattcaaaatcttatttattgataatttttacgtgttgatagaaagtacaaatccctaaaattgattttacttaacaaacagaacgctaaacaagcttgtagaatttggaacgaatattattttttttttaatttcgttgtaactgaaagctggggcgtaaaataattatatgctattaagatattaaaaatccggtaaggtgcaattacactttatgataaaataaacaaaattgtaaagacaaccctttttgtaacaaaatttctaccttctacaatgccactttgcgaatctaaaatatcatatccaaagtgtaattctataacaacatatatattcttatcattgtttatacgaagaagaagctaacgaaaaacacatgcatggatgtagcaaatagtattaggacaaacaactattacagattctgaaattaaacgatatcaccatgaggttaaaattattattgtaaaatatttatacgataaatatcttacttagttcgttcttttagaaaggcaatttaaaatgcaaattaattaaattaaattttaaaaattagtgggatattggattctattaaaaggggaggggatggacaatggcaaatgcatgaatcatgatgcttaaataatttttttacatgaatttgagactgctatgtaattgttcactgttgaaactagaaatgcacatatcacatatgatacacctctgtagaaatctacgtggtccagataaccccattcgaaacctgagatttctttagaatctgaatgccgaaaaaatccaatatattttaatcttgtaaaagaaatggtaggtaggaaaaatatagaaccagagttcgagaattatttttggataataaagtatttactaagattagtctagaaaagttatttaaaacaatctagacactataataagatgccattactgatacagtaaggacagtcaagttataaatttcacttctaaggatagagttggctgcaagatcatatcatccttatatcatcatcgagtaaccttcatggctagccaagttaaatatttgactactttacttccactttcaaatttcggccagcgtaaccacaaactgacgttggtttcggttttctattgcttctatatacacctcctaggttgggttctaatagacactcacatcgattagatcttatctcaaaattgtctgcacatgttcaaaacatgagtcgctaacttatgttgaccgatacatccaagtcattctacccaaaaacgaacactttcacaatataaaatcaggtgtctcacacaacgacagaaagtccaaaaccattatacgtaccataaatcaccaccccctacttcactaatacgccataaaatatgcccatgcgataatgatctatatcaacccaagtcagagtattcttttttgacgatacatgcccatctggaaattgcatatgcgaacattcatcaatccaaatcactaaatatacacttctgacagacccaataaatgatctatcaaattctggacctccacttgcagatctcccacaagccaaaatacatccagctgtaagctgcgtataaaacctctctacgtccgaaaaactggccacaagagatatatgagaatctgttgatctacccatggcacatacgataattcccccccaaattattagttaatagtgacggggctagagaaacccctcatcattagactcagctctctcttctacctcgtaacccatgagtggccccttctagctagggtacttgtactgattatacacacaacacacactacagctggagcaacattcttgcaggcttcactaccttctgaatcccttccgcgcacgaaggcactggtcacagttttccttttttcgtaactctcttttcccaacttttacttgtcgcgtatttcgctcaagtactcaaccaaaagaaaaacactcactttcgtccacaaatatgtgaagctctctctctaatcagctttttcagcagtaattttatgcagaaaaagcaagacatagagtaaggaaagctataatcccatggcataagaaactacatcaacccaaaatctacattctacagtgtcgggtaatattttatgcgcaaattccatgaatttgtatacttatctgccaggaattagctgcaaatcgcggaaacacacagcaaataacggaagattaacttatattttatgagacacaaaccacataccttgttcccagttggtccgttgttgaagacattcttttttttcttcttcttcttcttgctcgcaaccgtctgcttctcattgttcacgaaccacacaccactatcgccgtgcttctccaccttgtttttcttcttcttcaccttcttcaactttttcttgtttctattcttcatcgtactcttcttgttcttaattaccgaagcaacgggagtagcaacagcagcaggagtggcggcactagttgaatctccacctgaatagccataatcggatttctcctcatcttcttcctcaacctgaatcgctttccttttgccggcttcgatcggtggcgccaccgtaagaatctccgcgatcgagcgcttcttcggcgccttaggtatgggcttgcaattaaccgtcgaccttctcatctgccgccgttcctccctgacggcctgcgcgaggcaaccgtctatgtgtgcgtttactgccgtcaccgtggcggcgttgaaatctcgacaaacaggacacaccatctccatcttctcctccgaggaatctccttggtccgatttcgccgactcgccgcctccgcgcgtggatctcagcgcctccagccgccgagaaagccactcgaacttcgtaacggtaatcgaaacatcgtccgcctcgccctcgcggaacggccagaacttcaacaccctctcgatttgcggcggtggctgaggctgcggctgtggctgtggctgtggctgtggcggatgtggctgctcctccaccttgaaaatctcggctatggaacgcttcttcggcggcttcgactttgacgacgaagatttcaaattcataatcctcatgtggcgacgctcctctctcatcgtctgcgcgaggcatccgtcgatgtgcgcgttcaccgccgtgagcgtcgcggcgttgaattcgcggcacaccggacaaaccatctccagtttctcgtcttcgttgttgttattgttgttcgccgccgaggagtcggaaggaggcgcggatttctcggattccatagattctgcagattcatcttcgctgcaatctctgtcgccgtcgtcgtcatcggttctagaaacttccggagcagaaggcggaatctccggattttgaacgcggcgttcgttggaatcgccggatctagggcacaggttcatcggcggaagccacgactgaacctcctctggtgatacgtcacgtgaggaggtggatgcgaacggccagcacttgaaaacgtcgatggacctcatcttggatgtgtagtccctgcaacagcaacaccgaatcaaaacctataaagcgcgcttctatatattagtaaaaccaaatccacaaacaatagataatagaaaaatagatataccttatggagaatccatcaaacgtagccgccatgataagtgattacaagaagggagagactatgaagaagaagaagaagaagaagactgagaaaagaggaacatcgatgattatgattagatgagagagagagagagagagtaatcaacgttttgcgctctcacaccagaagagaagaaggaggaggaataggagagagtgttgtgtgtagctgtctgcttgcttttccctaatttatgactgatagggacgtatgagagagagagagagagacgacagatacagaagaaacgaaggtgagagaatattttattaattatttaattaacactcatgttttattataatgttaatgttggtgcttgttactgtaattgattttcgctgattaattattttattattgctaatcaactcttgcgctttattcttttctttccatgcatattattttcatcttaaaaaaaaattaaaaaaaaaaagtgattgcgaattgtgtgtgttgccttgctggtgggtgctgcgccgaaggttaagcgatgtatgtatttaaatgatagtatagttaaagggggcgtataatgtatattgtatggtagtatttgttaaatgctaatgttagatttgtagtgttatatgcccacgctcgtctacttatatgaaacaaagattctgctgtaagaccataagaccacaaacaatccaccatacgcgatcacccaccaatccacgcgctttctaccattataatatcacttctttttttaaaaaatatattattataaatagtttccaaattacttacgttgttttcttttttttttatatacaattaacgcgttatttttcatggttttcaggtccacttaaataataagaaaaagaactaaatcataaatcatgtgacattatacattaaataataagtactaccttaggagaaactcaaatttcaattactacttaatctttatggttcttcctttttttaaaaaagatgtgtacagataggagaaaataacagaagaaaaattgtttttcttcttttcttctaatactttcattttttgagttctactaatttagatttacttttgcttcatatttcatgggggcagagattataaagaaataatgagaaagagatgtaacaacaacagatagactagcaaaattaaatataattttctttctttcttttaatattttcatttcttgagttttatgaaattatattcactttcactttctacttgctgacgaacaaatgacaaagaaacggtaagaaagaggtgtgatataggagagaacaataagagtcaatattcttttaatactttcatttctagagttttactattaatttagagtcactttttctcagtgtttggcaaggaaatggcaaaagaaacaacgagaaagaggcctaaaaatgaaatataacaacaaaagtcaatttaatatttatgaaatatggtgaaaataaattaaaataaagtggcgggcctcaatcacatttctttccgtgtaaaaaagatgaaaaatgacaaagaaacagataataatttgacctataattaattttgcatacgacataatcttttttgtataataatttgctgccgatcgacatctccttacatcttgcattgaccatgaacttataatttgtgtgtctcttattttaatccaattcttatcaacttacaatacatatgtctcttgttttaattcaattttcataattctctgaaaaacacaaatctcaacctctctaaaacaaaacacactcaccaccctcattaattattcaactatttgaaactattttatcacgagaaatagagtgaattttctttctttctttttggtgctataaaacatccttcttagagctgaaaaatagggaataaaaaaaaattatgtatctgaaaaataggaagaaaaacaagtaacaaattattctcattcaaatgttgaaagtttctattcttcctcgtttaattttttctcatccaaacaaaaggtgaaacattagtaaaaaaaatgaacgataatataaggtatcaagaaagatattaaaacaagtactcttgactgtatttgaattcttggttgacatgccttaacttgaatatataatgagtcagatattttttttatttaccatgatatttgacattgtattaaaaatatgattataaattttagactcaagtctcattaaaagtattaaagaaatatttttacattaatactaattcgagtcacgatatttgtctaaagtatattcttaattatgtcatctgttctaaatatacctttaattagacttaatttttttttataattacatactcaaaatcaatcttaattagtagtacaagttttcaaacaaaacattgtgtattaaagtctctttttaaatatcttttatccaaaaaaaaaaaatcatatcactgtaaattactttgaatcaattttagaaaattacattgattcaaaataaattataggaatacatattcaaatatacacttgagtgtggagagagtctagctcagttggttaaacaataacatgaattgttgtaaattttttgacaatgtctttaatgtttacagataaaaacatatacttgagcaatgaacatttttatctttttttcgaagaaaagaacatatttatcttttcatgcgtaaaattaaacccctcagtcatcaaatttttatgggtgttcgtatttgttgtttaatagtatatcagtgttcttcgtatgaaaatgttttgtcctttgagacacttcaaaatatttaaacattgtatttacttttcctaaatatttgatgattacttacttaatttgaaactaaataattgcctacaagttcactgagagatgcttcgatatgagtccaactccatccattgattcattcatcaatcaaattaggccatggcatacaattaagttatgatggtgagggaggcaacaaggaagcaattagaagaaaggaataactattttgattggggagggaattcgaaatcgcaattaatgcctggtttgtggttttttgctagtttttattattattattattaatttttaagttaatatatttgttatttattagttgcaacttttataatttttttaaaataattagaatacactaataatgtaaaaatattttacattattatttaattacaattatcatatatgattacaattttaaatttaatataaaaaatagagtaaattttagaggcttacatcactaaggcgatctactttgacttaaaacgttgaaagtccatgataatcaagaatacctataataaagtccactacaagagacccaattacaagataagtttgatacattttagaataggagagcatgcattagcctatgggttagtacccatagttattaataaaaataaaatttgttgaatttgatttttttttaccaactatatatgcaacaaatttaattttaaagaatgaaattaatataaaaaaattgcgcttctttaaatgtgcattttacatactatctctaaaaagttatctcaaacaactattgtcctatttatatatactttactttcctagttgtttatcaatttcaacaaatcctattataatattattttaaattaaaatgaaatagttttttaaaagaacttatcagtagttaaaataatttataaggattgacaacttcaattttgagagtaaaaaaacatttttttatcctcctcttatcatcttgaatcttttgagcattatttatgagatttttacatctttttttctttaaattcacaaacctacatacatgactatgtaaattttgaaaaataaattggatcaaggccaaaatttactttcaaaacaaatactattgtcacatcacaattattctcctattttccaataattacataattaaataattaaacaaaaaattatgtttataaaagcgatataaaacattgcaagagttagagtagtttataaaagtataatttaattttttctcgtataaatttgttctctccatctaattttattcattgaaaataaaagacaaggcatgagaaagaataaacaaactcatacatgaaagaaaatatgatgctgttgtttataaattttctctctacaaatataaataaaaactaaagtaaaaataatgtaaaatttaaaaaatgagaagaaaaaagagagagagaacctacttatatattataaaaataaacgtttgtcttgtgcatcgtggaagttaaaatattagttatagttaaataaaataaaaagttaaatttgttctctccatctaattttattcattgaaaataaaagacaaggcatgagaaagaataaacaaactcatacatgaaaaaaaatatgatgctgttgtttatcactgtttttgacaactatcgatagtcaccacaccactcaccattaactatctcaataactttgattctttttatttttaaatatttgtttctagttaaattcgtttttaaaaatatacactgcaatacttaatagaaataattttaatattaatatatgcacggaaaaatctaagtgaactaagattactctttaaagcatagcttaatccttgattagatactttagatgtactcgatcgagaccttaaaaagaaatggtctaagacaggacgcatgcaggttggtcgcagttgaataagatgtattcaatctggacatttgtacataaaatatacctggatagaatgcatctaaattggacaaatttagatatatagattaagataaatgataattaaagctagcttgtaagaagaaattgtacattataattatccaaagacgtatataatcctctaaaaatgtaagttagtttacaaatttagttttcatttttattaattgaccataatactttttacaatgtttcttcaaaatcactgaataaggtgtgtgtattagtgcatatatatatataaaaaaaaaattgtctaacttcatggttattaattattttgacgagatcactccagataatcaactagttgtgatgagtaagagattaattgattcgtcaaaataatttttgtctttttcttatttattatttttcttaaatatgaatttataattttttaatacgaacttttttattttattgttaatctatattctcatttttatttatactttcttaaatattcggtatacgagattaagataagacctattatgattcactgtattatgattcactgaatgcgatattaacttctaaaaacacttgcatataagaaaatcttctaaaaacattatggtagaaaaataaattcttaaaatattctcattcaacatgagcctttggatttacaatacagaactagacttaaactgaaaacaaggaattatttgattcttttataattttttaaataaatttcaattttgaattaagaattaatttcatagttatcctaaaaaatcaaaaacttatatagatatttgagattccattggagaaccaaaatttgtaattccaattattaaaaaaacagttcgaggttaaaaaataagaagaaaaaaataagtttgtctttttaattttaaaaataattaataaaaactaccatcgtatcataaaaaaatgataaatgatcaattttgtctgtgtactttacattcgtcgtgtaaatatattgacaatttaatcctatcgtgaagtttcatccgttttcgttaatgttgagtgtcaacataacacatccttgatgacgtgacaaatccacatgtataggagatgctccacatcaaccacaatgttttagactaaaatgttagtgatttttttattttaaaatttataaaggtaatgactattttaagaacacgatgactcttctttctaatttcatgataatattttcttttggaatgacaacatgatccctaacgaatataacttaacgacaaaatggttcatgacaatattgtgaatttaaagacgcacatgtatcatagatagtaaaaaacatacataaggtcagtctccagagtcccaataacattcttcaccctccacgtacatactccaacaccctttcatcattttgaacaaatcgacctttgtgatataacataaggttaatcttttcaaacattcagtaaaaggaaacacacaaaatagagtcaaaagaagaagaaaacagagcatctttgtatcaataataatatttattctttttcatacccaaaacaaagcatcattgtttcagttcatcaaagcatcatcgacaaaccctaaaccctaacacatgtttaatcccttgtttgcctacaataacgaaaaaataggaagaaatctaacaaaaatgatggccacatgagaaatgttacaaaaatggaggtcattaataaagtccagccaaaaaaaaaaaacatctttccttacggagttgcctttcatcttcaacgcataagaagaaatcaaacaaaaacggcaaccgccaaccaaacaccaccatctgtcgccaagtcgtcatgggcatcgatgatgcaaaggcaagaaagagcatagcaaacttagcacccataattcaacctttttcttacaaaatgtaaaaaggaagaggataaatggtgaattaataaaaggcaaaagcacacacatactccaattgacaatttggtccaacacatggctttcacttccaccacatggatttgtcacgtcgtctttcatgtgccacattgccaaaaatgttaacagaaatgaaggagacttgaaggtaggactaaattgtcaatacatttacatgattgtagactaaattgatcattttcatagtacaaaactaaattgacaattagtgtaaaatacatagaccaaattggtcatttaccctaaaaaaaagagtagttatacatgaactactcataattttaaacactctattaacacctctaatttctcttcatctctatctttttatgatatcataaatcttatcatacctatattttttttcgctccctagatattgggtagcatattaatcattaggtgtctagaaaacattttccttaaaaaatatttattttcaaaaagctataaaaactatttttacctatcataaatagttatgaaacaagaaagcccacatctatgggtaaatgaccaatttggtccctgaaagatgtatcctatgataatttgatccttgaaatatgaaataaccaatttagtccacaaatgtacaaatgttgtgacaagttagtccgaccatcaagtctttactgtttccattaacctttgtgcacacatgacacaaatgtaactaacgtggcacatccactgttggtcctcaagtccaacatccataaggtcaaaggacaagacacgtctaatgcacaccgttttggacgaaaatgtcacttagggcttggcggggtcgaggttggcattaacctcgtcactacccttgagtatctcttacggtaattaaaaggcagcgttggagaagacatcgatgctagcttggtgcttgagggaatggacctcgatggagggccaggtttcgtcgtcgaggatcttgttctcaatgtcgatggcagagtggattatcttggcgatgctcttgttgtgcatggtgacaaggcaggtgttgctaacgctgtggaggacaatgtcgggggccatgaagatctcaacatacttgcggctaagcttctctggcgtgacatcaacgtcacgataggtcgtaatgtcaatgcagacaacctggttgcactcaaagacattgacatagttgtgttggtatgtgacgatgatgccgatgacgtaggtgtagttcacgaggtggactaatttgtcactaaatgtttgacttgtgaaggtgtgttttgaggagccaaacattaactgtcattttggtccaaaacaggatgttttgagaagtcaaatattaggtgattatttagtaaaaaatgatgaatatccgacgtgtcttatcacttgacctcatgaaggtgtcacgtgtacacgaggatcgacaaaaacataaaagacttaatgacggaaccaatttatcataatatttatacatttataaattaaatttgttatttctattttttagggataaattgatcatttattccaaatatcttattactatttttttttttctaactttgtagatactattcttgagaactgaaaagacgtggaatggaagtatcgtgaagcgcgtgaaagggacgagttgtgtggtgtcgtgtgtggcgatgcttagaatatgaggcgcccccactaacacacacacacacagtgtcacacagtttcttgcagcgcgcatcattttgactttaagaccttttgtttgtttaaactttaaagtaacgtacaccgcaaattaccaacttttagcatgtttagaccaaaccataggatgcagccaaacacactcagatttaattcaggtagatagagttttttttttttttttttccaagataaatatgttagataaaattatagttgggtgatagtaaatataactttaaatatcaattataatgtgatctaaaagtaaaatattattattacataaaagttataatttataaaccatattgaatccaaaatatttcatgatttgtgaacactcaatcatgataaattgttaatttttaataagtatctcaaaaagttatatttataataattttctaattgattgatgatgtaattttttttataatattatgagtattatttgtaggaagtaattttattcgagttaaataaaatttaataattatttttgaatatttaatttaattgcaattgcataattaaaatttaaatttaattttttaattaaattaaaataattctgtccattaattcacatgttaaataatattaaatttaatatttatattttatttgagagttttataattatgtattgataaagttaaatattattaatcatttaactttatcaaatatcactgttattataaattttaaaataattatgataaaaagtatgaactattattttatatgataatttataaattcttatttgaatataattactgtgaagaatatagttggggcgtggcaatctggcataatgatacacgaagtgactgaaaacatcatagatgcatgcggtcaaagaaaacgacaagaaggtaggacccacccactaatgataatggtattcgtgtcgtgtagtgcacagattattctctttctgtctaattctaatctaatctcactttggtagtttggtttcgtttgcatcatgcctagcttccaattccaacacccaaatgcaattttcagttcttacctctctgtttccctctacactcccgaatcctcctcactcatctggtatgtgcctataatcattataatatataatttcatcaaattagtctttattctagtttggaaagtcttccatgcattttctattttatatatttctatttctttagcatatataacttacttactgatatcatgattcatgatatatattttttgttactcattttattatgatacctgcccccaatccttaatcaagggatcatttcagtaaagaaaatgaaatataatttaaattcggctggagtatggacttggtgataacaatatatatggacttgctgttttagctcagcacttttctggaagagcttaaatatatatatatatatatatatatatatatatatttttttttttttttttcaatttttgtttgaggagtaggaagtaacacagtggtttgctgattttcattcccaaaatgagcaaagcaggtgtcaggtgtttgggttgaaatttgttgttatttttgaaacttcaaccatattttggatattttttcagttgatttttttttcctttctcttccaatgatgtgttttttttttttttttcctgtaacagattgaggatcagattcaagtgcatcttattgttgaaatcatttcctgtttgctgatcctggctgatgaagaagttggaggagattgatattcaacctttgaaggttgttgaaacagaatctacagtccaagcaggcaagcaccctccaagagaattgaaggtccccaagtcactgttaattgaaacctcaacaaccaagtccgaggatcaaacaactgcaacacaatatacagcaagaaggtaacaagaaattccaactagacctccatcatgagtatggaatattttactgaaattgttttatgcattcaaatgggggatattagaagagtgttagcaatacagtctctattccctatacgatggttaattaatgaaaactacaaaattatgattgaggcagatgagcaaagttttgtgagttttgaataaattttaatccataataaagagtatattcaaaagagtctgttactgacagacatttctcaatggggaaatataaatataagtcacaaatgaaatgcatgagattaagtttgcttcagacaggaacaagaaattaaaaaatgattggcatttatttattgaggcaatgctagattttttctgaagctcttcggggatcataattcataagtaaaccatgttgtcattccacccagaaagaaaagatgaaggagatggttgctgtttgctttgataattgaatgaacaattaatgcaggagagggcattgagtaggatagcaatcatgaaagagctaccctttaggtttttgtgaaagcagaagggtttagatacaacttgagtgttgttcagcttttatttaatgttccatccaggatgtacaatgacaaccagcaagggaacagttttaaaattttcataaataaaaacataagaaagggcttattatctcttatgtaaattaccttgcaaaatgtaagccttactactgattgttggactgaacgtggatgcaaaatctgaatttaattatatgtgcatcatttccccctttatagataaagaagtacacagtccacaagaggattatggtgaatttgttacctactgagtattgacaaaaggagggggtaactcttaagttaatttgactatagaaatatagtgagattaaaaatttgacgaattgtacaaagatgaaaagcaaatcacttgtgtctggggtgttcaaataaggtggaattccaccttgatgttagagtttgcttttaaattacaaacaacattttagagacttgaagatactaatgagaactatttgtttgagttttaggtgtaaaaggatcttccagagatctagttattgatgattgatgacattaaatccatggatatagcaaaatgaaacgaaagcatgagaactattaattggggaaacttaattagttacttaatgctatttgtttataccaagtttttgtgggaccaaagatataaaataaactttgttgagtttctttaatttgctaaccgtatggttttgaactgcaaaagcattgacttccaattaatgtgaaagaaacattaaccttgttgtttgagcattatttcttttattgtgaggtagtagctcaagaactgaatgcttctgagtttcagttttgttaattacttggcaagtgtaccaattcgtctaagtagtagtaaaacggtaagaccgagtgtcaaaatccacatagactttaactatactcagagtttgtatatatctaagtttaaactaataaatgactaaactatatacttgtcaagtgataatgcagacatgcaaaattcaaccgtaaataaagataacaaggtagagcacacgcaagagacagaaaaacaaatgcttggaggtgtaaattgtcgtttggtgcagatttttgtggacgtgttgggtgttcgacctaccgaaactactcttgatgcaatgttagagatttttcaccatttaacgttattccaactattacctttatcctctaaattaccctaaccatgtttcctcatgtaaaatagcctaaattacctaatttcactcctaatcccttaagaactacatcaaataatttgttttaagaataaagatgcataattaaggctaaataacaccattttatccctaaacatggattacctagaagctccttcaagttcttagggtacaaacatttcccaatgattaaaaccctataacatacatgtgaatgggtgatcaaatcataaacaagacaataaactcataaaagaagcaataatattaaaatagcataaaatggttagtaaagatcatcacatcaagagtgtttggttgcctagcccccaacaatgggtgatttagcctctcatagtcatgagagactcagaaatacaaaatgaagcaaaggaaatagaagaagaaggactctaagtgagtgggttttcgttccctattgtgccttactatttgtcccttaatagtacagtgctcctcctttttattcttcaaaatgctgcacattcgtgtttttcgaaaatgaatgtgcactaaacctgcatgtgcacgctgagcgcacatgcaaagtccaaccgacttaagtgaccaagcgctaagcctccaattgtgcacttaggactcatgcatgatattggcttctcgcgctgaggcatgttgagcgcgatgctcaaattcttcatacatcttccattcttgtgttgatgtgtccaaaaactctacaaaatagaacaaaacattgtaaaattactaactttaacattcttaagataaaaactcaaaagaatctaaattcttatctttttaagtcaaaagaagcatcaaaagagaagaaattaaataattgctatgtcatttaagtgcacaaactaagtatgcatagcaattatcaagttcatcatgctaaggattatggagccttcaaggaagacattcatttatatatatatatatatatatatatatatatatatatatatggattttgctgaattaatgagtaaggaatatctattggagaacaaaaatgaaaacgaaacgaagagaggaatcatctgtaaattggaatttattaattggtcgaagataaactcttacaaatatcttgtacttgttatgaggctgatgtgatcctgtcaactttttgcatgagaaaacctctgtaggtgcatgtttacagaaaatcattgagtctaattaataagggtgtaagcactcatttgtgcttaaaagttaaaagtggtttttgtctatattactaccaaatgatatgtaaggagagacaaggtggtagttgaaatttgtcatggtaatatcataacactgttagttcattcttgaacagcaccaatatatataagaaataagacaggtggctttctggatgaggaaatctgatcacgctaattactcaataaacaaattgtatgttcattcacatttgtgcattatgtgttactcgatgcactaattgtaatcctgattatttagcttttataggttgaaggaaagaggttctaggctactagtttgatgagaacagcttattgaatgagtcatgagtggttgtgcttgcccgttatgatataaattgttggcatctaaacctattagatttcagtgttagtaacatagttcatgctgttaggctgtgttgctgctgcctttaattacactataaaggttttaaatttcctgctgcaggttctgattttaatttctgttgtgagattttatgtttgtagtagctcacttgctccttagaactactacaaagaagttgggttatcttttgataatattaatttggtttcacatcacattatgctttatggtatggtaaagtcatacttttattttttatttatacttttgtgaattaacagtaaattttccccttagaaaaagttacaatcttatatacatttacaggaaatataaaagtaagttttttatgcaagagtaagagaaatgaatattgagttattgaccattggattttattatagatggttaagattagaatataaaactaacgtcatttttttaaatggtcatgtgatattaagaaacttttcatcttaatcatcatatgactcagatttgctatatatgcaacatattgtgacagctagctgcaatctatctattagaaaaataagtcagacgcacgaaatgccattgaggtagctaatgatctactcaaactcttttactttgcttttgtagtataaaatttgaattggttacattaacttgtcatctatgttcgcctatgtcaactattggatctcaaacgaactttaaaacaatttccatcaattaatctacgcacttagtgatcaatagcttttcgttaattaatttaagttgtgtttacttaagcattgtgtcaacccagatccgcattattcagaagcaagatgttgtagtttatgcctcttatgggttattggatttggtttccacagttaatacagttcacacacgtgatttcaaacacaataagtttctttgtaggtaaaaagtatattatgataaaaaatacttttaataaaatatttaattgtcctaattatactcctgactcctctttatacttaagagttcaaataatgagtaattataaataaaattacaggaccatttttcctttatctaagttttaatcagtgacaaatagttttgagcatcttactattgacttttaacatttcaaaagaaaatgaaaatctgaacactttcactgtcagatttaaaagtttattcaaactgattattttatgaagtctcaaatgatagtaggtgtctaaaaattggccatcaataaagctgaattgagaattaagaaaaattactggtgaaatactcatttacaataaaatgaacacctatctcttgaaaaaaaaatagtataacttttgacaataaaaagtattatagttaaaacatctatgaaatagataaaagagtgtaatttcatagagtaatttgaagtaataaaagatcaaaaagagtatttacaaaattacaaccccaggtaattaagagggagacaaaagtaactgtgctaagacagctcccaaaatggcactcaaataggaagttgtaagccaaaatgggcctacagacaaagaggttccctcctttcaccgtacgtctttctctctttcactctccacaagacacacttttcttacttacttaaacagtaattcttcactttaatactattaagcatgtttaagatgcgggtgagcacatgataactaagaatgaagttaacaatttccatatacaaacaaatgagacaccaaaaccgaagaaaaagcaattagatatatattagctagcttcgatatctgtctcaacctacacatccaattcacttctttgttaccacttaagtttgtttctgagccaagcttgtgttgttctcaggtacacaaatggctcatgaacataatttagaaattaattataatatattaattaataatgaatttttttacagtgtaattttatttaatccttggtttttagtatataattgaaaatcatcaacttttgtaataattatttcaaacatcttattcaaataatgtctaacttagttgataggaatagcataaagatcagtgtatcaaattaattaaattattaatatctctcaaaagtgacattgtctttcttattactacttagttatattgatctttttcttttcatttgtgtctggtgatgctttaaggttcactgtttgattcagatcgtactaaagtagaatatacggttgcaacatgtaatggtgtcaggtgtgtgttgttgcagcggttaattttacgtgtgaaaattaagaatgaaggtaacactagtatgacaatgattggtgtttcagaaacgaggcaccattaaatttgaaattgtagcacttttagttttaagttttaacagagaataataagaggggaaagcttggtaatgctaattttcacttcaaccctcattaagatgtagtagtatttactttatctttcatcttatttatattttttttaaaactaattcacctcagtttatctcacaatgagtggacgtatatatttatccttttcatttaaggcctaaatgaaagaatatcatatgatatgtagttttaactatcaaacaggattgatgtctccctctaggtctggttacaaatcaataaaatcacttcgtaatcaaattaactaacatctcattcaatttatttaaattacaaaagttcatctcatttagccttatactccttatttggaaaagaagcaaaaataataatattgaacgtgttgttttttgtgctgcctaatgcttattgtaaagtctagacagttaatttaaacaagaaaacaagagagagagagagagagagagagagagagagagagagagagagagagagattaagcctgtgttttgttatacatcaaatacctgagaagtggtattttcacatcaatgacatgaaagaaaaatagaagctactatttatagctcctgcttgagatcaaatactgatcgacaagtgataaacattaaaccaaacaagcagtaaggaaaaaaagaaagcaacaaaccttcagcaaataaaaattcaacttccattttcaagtacctgtatatatgtgaaagcgataaaattaaaatgacttcaatttttgagtttaatgaatatccactgttaacataaatgatatttaaattaatgtctgatgtattgatatatcattacttattatcatatcatcttttattcattaaaaaaagtaccaaacgtattgagttttagtgtataacttctattatatagaatacatatttttttataagcatatagagaatacatatttttttattttataattaagcatagagagaatacatattaattattttcaacataattaaatttttgaaaacatcagttaatttttttaaaagaactcattgattgtccatgcctaaatgcgagcagtaaagcaaacattatattgattcttcttaaattttgaatttatatattttcagatttcagatcgtctgttaaaaattaattactagcaggtaagcaaaaatactgtttgggtacaaattatagagaaaggtaatcccatcctggtattctggtagtcaaagttgtgctatgcttctgtgggggaataacttacagtggatcatgtttttgttaaatttttagcattcaaatgctaattttaaatttagaactttgtacagttaagagactaattaagttttatatatacaactcataaatttatttgagggggatcaagttatctgtcactcaaaccaaaaaccaataaatacttatgccttatactcataacgaaatccattagtcctatttgcaacccaacctaagttgtaaaatgtactaggctcatggaatgcaaatatctaaaatgatttttctttttcaaagtttacaagtggaaagtttttaagggtctagttagacttcaatttatgaatatccttttcttctaaatttttgatgaaataagttaacaacgttatcaatttttgaattaatgataacataaaaaattacattattattaatcataaactaacatatataataaaattgttaatttttataagattatttttaaagtgatattaaggtaattttaattagtttccacgtgacattataaaaatatttacattaacaatgtataaaaaaatcaaacccattaactaataatttcttttttaaataaaaggttgaattatgaaaaaagaaatataaaaataggtaacgccaacggtcaaaatgctcttaatatgtccactgtccattgtcgtagacttgtttgcagtattgcagttgcagcagcatctggacacatttgttacaaaccctcagaatggcactgaaccaacctagacattagataggtcaaagtatgcgaacatgcacaaaacattgcaaaagcagatcccggcttaaaggtgttcccagactactaaaaattatagtggaaataacacagtttcactttcagtctgcattttctgagctctccgaaaaggagtttaacaatcgatgttaactctaactccagaactagatctcgttacaacgaaattggaagcatggacagtgatcggatgaacagaatgtccgagtaaggagaactagccaagcttctgaagccttttctattttagttgggaaagaacggcgaagtccatccgaacctccaatgaagaataagaggagagcaaagcgccaatggtgcgcgaagcgcatgcgaaacgggcgcagagaaaaatcagtgtgttagaaactacaaaaaaaaaaattaatgcctaaaaaagaagacaacaaaatttgattgcatgtaacaaaatgaccctttgtttgttattccttaaaaattctttcatcttttaagtgtaaacagtaaaaggatttaatttaattgattaaacagttattataaattctttgattcaaatggataaaaaaaatgttttgagtttttcctaaaaaagacaaatgaaaagacattggcagcttctatccatcaacatcgtcctgcattctgattcgcaaggttgtctgttatcagaatcataggcagcagcatcattactgaggaagaaactaggaagcaaaacattgccacttagctatattgcaaagaaaattttcgttgttttaattttgcagcaaaaatcttcgtatttacaattatatttaaatagatggatgaaagcaaacaagataacataaggatcagtgttaaaaagtaaaactgttcaccggtccaaacaggtaggtactcaattctcttgaggcccacacatgagaataggagcaacgacatggtaccttctttattgaaaaagaacagcgtcttaacaaaatatgcctaaggttaaaataatattttaaaaagataaagtttagaaaagaactaactttttttataagcaagaactagaaagaatgtctttggacaaaattacacaatgatatgtcacattcttttcagaatttattcaaccgcacgtcgagcgaaagttatttacaaaaaactatatatatgacgtgcaagtatatgatactgcatgatcaaaaaatttattggttcttgatggcaaggcaaatatttatctggccgtaaagcgagatgatcggctacttggatttgtgcgattacccctaaatatggcttccagattctggaagcatccaggagtcctaacctgtgtatcataacaagaaaatattacaccttaggaaacaaagaatcacacagtctcgttgtaaaataactatatcgcacaatatccacacctttgagggcattctactggtgagatggattaaaaacagtcaatctagtaaaattacgttggtataaaaattattaatatccatccaatgatacagaaaaagtctttgaatctgaaattcctcacattctgttaagttttagtattaaaaattactgcgaagttatatactaccataactaggtctaaaaattgatgaaagaaatattcacatgaaaaagggataccttccagcccctcttttgagcaagatggtagtatatgtcttccaatctcccaattatttgcctaaatgttggccttctgtacggtttttcatcccagcattcctcaattaacctatggacaaatcaaatttcctgaatgtgaaaaacttattaatttaatttcctacttgtggtaggttttgaaactaaacattcaaatctgctgccaattaaatgtatttaaaaccctcactgttttagcccataagcataaagctttggtgaagctctaaatggtggacgctcattttcaacatatgctttaggaacttcattttctggctttgcataaaacggtggacaaccttcaatcatctagaggaacagaaaatcatgcaagttcctgtcaatattttgctgggcatctctacaaataacaacctacagttggttgtcaatctgtatattctatatacaaaattgcccatcatccacaaataaaataatcatattttgaactttcagaaaatgaacattttgtcttcacataaaaaaaaaagtacgagaacatattggtaccacaacaaactgttgggcatggcatcttacttaaatgaccatgaatatacacatatatacaaacatttatattttttgggtcaatatgtggagaactcaaaatctctagaactctacctgtccattagatcaaccttaaaatatgcaataaagcattgtatatcacaattatatataatatacatatctttaggattatctgatggacaaagcaggcagagctcacaagtcacgaatgcttgagctgtccatagactcctatacgtatttacttgacaagtgaaagaggtcctatgcgtaaaagacaccatcaaacatctaaaattcaatatgacgtaacaatgctgaaggaatttgaatgccaaaagcaacataggatacacagcaacagatgatacacctctcaatgcattccttttcctgaacttccaattttttaactaacatgaacaacacagatgtatgtatgtaggggatatgactttatgttcaggattatgtaaatgcttttaattgctcaaaatataactgaaaaagcacagacaacataaagtaaattcccttcttttttaagaaagcaaatgcaattaacagccttttaaaagttttatgtgatgagataaacagaaattacaagggacggagagtattgaattagcatgtattaattgctcaataccactataatattccacaagcatcaattcatcaaacagattttatatttattaattaatttgccagtttagggtttaaaagtcttgtttcaagaccagagaagatacaaccattcacataataagggtaaataattaacttggaagtcatttaaaagctctaaaataaggaaaatcagcatgcatccaaagatgagcaataatgatttacctcctgtaatatcagagcaaatgaaaatacatccacttttgtgtcgtattcctcatttctatatacctctggagcaacataacgccctgttacagatttgaataaattcatcaatacaaactttgaaatcagaaccaattacaataggattaaaataaaaccagttatacatataagagatggccatatttataaatcaattgataaattcaaattagtaaaattgagcaccagctgacaactgtctatggtagtcactgagtagacagcatttcttttttccttgcagaatatgcaacactgtgcacattacggccctcatgaaataagagttcacaatattgcttttatgcagaccgacatgattgaccacgaatattacaaggttccagtaaagatgaaaacttgcattatctatccagggctccactaaagaagaaaacttacatgatgtatccaggcttgccacgggtttgtcttctttgaccgttttagcaactttaagcaacttgctaactccaaagtctgcaactttcagatgcccagaatcatcccgcagtatatttctgttgtcttactcatgtacaatgaagaaactttaaacagttctaaccattcaataatgaattaaaaatgcatgcttctactgaaaagtccacgatacttcatacacatgctggaagaataataaaatcaacaagacaggacaggagaacataaaacatacgaaggctcaagatctctgtgtataatggcttctggtttatgttcatgcaaatagttcatacccctgcaaaatatacatattttggaattattacaaatatccaaatgaaaatttttaatataggagaaaatcttcattaattattcaacttttcaacaaatgaaataatcaggagagcttgcttccttgcaaaccaactgaaagctagtgatgcatccataatatgaaagctcttgactgacctagcaatatcaagtgcaaactttacagctgttactggttttaatgcacctttctgcttcaagtaggcacggagatccccctaaagagatgataatccattccaaattgtcagacattacaatagtgaaaaatacaaggtatagttaaccacgttatacacacaaatagaggagatatcttcctaattatatgcacttatttttttcaccatttcactaacataaagtgaaatcccaataaagataaatggaagttctaattcagcacttatcaatactagactaaaatggttatctcttatcattacttaaaatccttcaatttagatatttataacttctagacagaacaggaacataattgtctgaccggattcagttcctctaaagtgagaaagtgagaaagtaagaatctaccaatcatcaatttgaattaaagcattttgtatacataaccgactttatatcaattgtagataatcccacactttttcacttagagggccaaatcctgtctggcctattcagaattgcaaataactcctgacacttcaacaattagtatcagtcccagtataacttttatcatattaagttcttaagtattaattttttgtgcctccaacataatgctagatttcaagtagtcctattgaacctacgctagtcactttctttccaaagactatatccaaaatgataaatttctgaccacatattttattcagctcactattatctatgatagccattagccaactaaccaatatgatttgttcataaacaccacgggcaaaataacttatcataaaaaatcttccatataaccagtgtaggaccaagactaacctggggtagatattctgtgacaatcatcattggtgtgctttgtgttacagcacccaaaaactggactacatttggatgccttattttctcaagtaatgtaagctcatcatgaaatgcctttctgataaacagacaccaacaaacaaaatccactatgagaacaaaaattgagaactgaatatccaattgagtaattgacatgaatgaaacaacagattgcataggtagaccaacccacactttatcatcatcagtgaacaattcctccccaagtgtcttgacagcaacctggattccacgccataatgcaatcctgaaagttccctaatattcaatataaaatatgaaacaaaaaataaatcagggtaaattgacttgagagaatatgtcaaaacaaggtaaaaggagaaatcaagttacaaaacaattgaccatacagagaaaggaaacttgaaagcttacctttgttatgcaaacactattagtaaaatcaagttcagaaggatcaatctcatactcaggtacttcacgagcattctgcacatgcatgggagccatctacaataaaaagtcctcagttgcaacttgatgtcataaacaacctatactaaaaggagtttaatatctatgcactgtcagtgtaaaaaaatacactgcagtgtaaaagcaatttaaaaaaaatacttttttaagaaacaaatatgatttgtaaaaaatacttttttaagaagcaaataggatttgtaaaaaatacttttttaaacaaaaaacagaaaactagtactacttttttaagggaaaaaaacagttagacaaacacatcaaaagagcagaaaacaatttattttattcaaaaaagtgttttctctttaaataacgtatttattgtaaatcaaacaacctaccatacacaacaatatggtattacgaattgtgattgaatgaaatataaaaaatttgtacagtgtcagtttatatactactttctcttctaaaagcttgaactataaggcgaactggaattatatgtatgctcagacagcgtaaaaaaaattatatttccattcatgataaatatgtttgactttttataataactacttaaaaaagtcatacaaaaagtaatatctgattaatagacaacgtaaaaaattccacaccaaaagtgcacatctatctattaatctctcgaaatgaataacatctttatttttagaggaaatgaataagatctaagaagaagagacataccgggggtcttgcaccgtgtttctccaaaagcttgacaacttggtggttcttgtagtacatggcatcaactagaggctgttaaacaatccaatccagaaattagggtcagcgagtgtagaataagagacagcgagaagagcgaaagagagtgaaattacggtgctgccccagcggtcttgtggatcgacgtgggcgcctcgtcggagcagcaagtcgacgacgtcggtgcggccctggcaggcggcgacgtggagcgcggtgcggccgtcaatgtcggtgaaattgacgtcactcccggcgtccaagagctccttaatcccgtccgagtcaccttcgttgacaagatacatcaaacggaccgccgggtccagcgactccgacgagtcgccgtcaccggcgcgctccggcgcgagggaggattggcggccgagcgagaagcgagggtggagcttcttggtttccattgcggcggcgagggttttcggtgcgagagagaatgtggattgaattgaattggattggattgaagaagggatgagaataagagagtgtgtgaatgaacattaatgtgtatgtaatgattttttggttcaattgataaaggatgggatcgggttctgtgttgtgtcagagagtgactagttcaaatctttgacgtcaccgcctttcttactacacactccatcgaggaaggaacaacgtcggttttcggtaatgcctctctagctaacctaactaagtttttcttttttggacaactatattttctaatagtataatttaagataaaagcttagatggttaagttgactttcttacagattttttttctgatatttttccaatgttgactttctaattaatttttttaggagattctaattaaattaattgcaacgttaatgacttttttttaagatgaacgttgttaaaactgaaccttcaccgtagaacacggtggatatataataaaaaatgagaaaataattatacatattataaaatattttatacaatcattaaatcataatttattatataaaatatttttttttaattatactatcttataaactagtcaaaataacttataaactactaaatgatcttactaactactcataaatggccagtgacacttaaaagctctacatccttttataagaatataatattacagttatatgataataaaatttaaggattggtttggtaagatgaaagagaataaaataaaagataatttgaaaataaatatttaaattaaaataatgtaatgaaggtatcatacttttttatatttttgaattttttttttcacttctcaccaattttttcacaatcaaactcattctttatttttttttttcactaaatatttttctaaatttatcaattgaattgaaaatggttatttaaaaaattattgaattatgcttataaattattgaatttttcatagtgttgtattttgctttcttttcatatattgcgctttagttattggttggatccatttaataactttatataaattatcaatttttcatctctttaatattattttttagggtgatgtgaatagacatatttttttataccttttatgactttctttagtataatttgggtggaagagttaaagaagtgttttatatttagattttttttaacatcgctagatttatgaatttttaaatggagagatgtatataaaaaaatgggacataaaatacactatttaaccaaattttaaaattctaaatatttaaaaacatgaacccgttttctacaatcgggtcaaaacaggagctccgacaggttcgcagccatggatctacctagctgaagggttcaggttcaggttcagttcaggaaaagagacgaagattttgagcgcggaaccattgccattgccgtggccatggctttcaaccatcttcgaaacctcaatcgcatctccatccaccgcattctccaccatcgttttcagcctctccttaacgctactactaggttcttcgccgatgctgcttcttcaatgcctcaaccgcagcccaaacaacaaccttcgcctccatcatcatccttgaagcacaatgagctcgccaagttcgccgccatcgccgatacctggtcagctttcgaaacgaaagagagaatctgttcaatgaatttattgttataaacaccacaattaaaattaaattgcacattttttttcatggggtgaatttgttgaagttgttgctactgtgtgtgtgtgtgtgtgtgtgtgtgtgtgtgtgtgtgtgtgtgtgtgtgtgtgtgtgtgtgtgttagtttgagaatatggatgacatgtatttgccctttccttgatgtgaataggtgggattctgaaggcccctttaagccattgcatgtgatgaatccaacaagacttgctttcatccgttctgcactttgtcgacatttcaagtaagcctgctctttcatttagtccttgtacctccattcttgagtctggggtgtttattcttgaaactactttggtagaatgtgcaatgctttgtgctatgttataatttgattcctttttctttttttgcatggaattagtgggtttaaaatataatctggttgtactgtgtcagattccaagccactgttatttatgcagtcttattaaaccaatagcacttagtgtttgctacacatacatggtaggaatttggtttaataccccttgaattaaatataatcgtataaggatgtgtaagaagatgattctaatgaagtatctgttaataaaaagtgttaactgaattattttttgacacaaaccaaatgaagaaacaagaagaaaaacaataggaaaaacggtattacggttgacaatgggtttatatttttattttgtctctaacggggttctattcaaataataattagatttcacccttgtctcaggaaggacccttatagtgccaaaccccttgaaggaattaaaattgttgatgtaggttgtggaggtggaattctttctgaggtatatcttttcttcttttttcctgtgatttttggaaaagaccttttcctttttatcttctggcaatctggcctatgataaacctatagtttggtataataagttcagagatgactatatttgttgactatattacttgttatcataatcctcatgcgaatctgtagcattatgatggattcagaggtgactatatttgttaggttgaatacttgaattgtggaaatctgaattatttctttggtgcatattggcctccctctcacttatagagtattaagtttgttattgtttttttattgcaaatttgtgctcttttttgttgttattttataatttatagccatgcttctctttttgttcttcagccactagctcgattgggagctactgtgatgggtgttgatgctgtagagaagaatatcaagattgctcaacttcatgctgtatgcttattatatttgaatatttgaaatttgtcagtcttgtcctacaaattgattagattgctgtattctgtatattggaggaagcagttgccaacattagtaaattaaatcttcactatttgccggacaacttattatctcctgtcaacagggtttggatccagcaacttcatctattgagttctgttgcacgacagctggtacatttacaaatcttgaagcattcttttacacttttgttttacatccatttttgacgtgcatgctttaagtctgttaacatttggacactactgctgaaatgccctacttatccaaatgaatgctaatacagtttagttcacaatcttgataagaagcacaagtctgactggcataatttccttttatctaattttctgagtggtttttccatggattcagacctttgctggatagtttagagtttcaaaagttacaagattatgatgcattggcataaaaaacttaaatattttcacttcctgttggcttgtgatttcttgtttttcttacagcttgtagttaataaccattttatgttatttatcttaacttagagtcttagaatgtatctttggctgtagaaaagtcaattttttttgctatgatcttatgtcttcccactagggtcttacattgaagaaagtttttactctatcccttaatgtttctcattatacaaggtatcatacttggacatgctaaatcgctcaagtgggtgaataagttttaagctaaaagagttgttacattacatatacttaaaaaattgaacgctcttggtacatcagtacatgcatgatggcttcaataatcattgtaaaagtcaaagttgcttgcattcatctagttcgtttcgaattgtccttatgtttttgggtattatgcactgcattttacaactcaccaacaattttgactgatcagagaagctagttgaagaaggaagaacgtttgacgcagttatggccttggaggtactttctctttcgtgccccttacctctttctggttgtgtgcttgcagattggagtgcataaatgggtgttgggatacaaaaaaaaaaaaaaaaatatgacataacttgtagcgtaaaatctttgatagtagtacagtactcagtggagttgaaggacacattttgccttgcattggttcatttgctttgaatttttttgcaggtgattgagcacgtggcagatcctgcagagttctgcaaatctctgtcagcactaacagttccagatggagccactgtgatatccacaatcaatcgatccatgagagcctacgcaactgccattgttgctgcagaatacattctccactgggtattcattcttctcaactcaactccattcaacacttattttttccatcctacattcaatcgacacattatatatatattgaactccacagcttccgagaggcacacatcaatggtccagttttctcactccagaggaacttgtcctcatcctccaacgtgccggtatcaatgtacatacgcaaaacgcattcataatttcaattgttagggattaatcatcgcattcacgtgacactttattctggttgcattgcacacacaggtggaggagatggccggattcgtctataacccggtgacaggacggtggtctttatcagatgatatcaacgtaaatttcattgtgttcggtaccaaataaaacaacaccaaatagcatagatagataaataaataagatccatgttactgttattactataattatcattagtattgaatattgaaatttgttttgaatgctgaataataaacattaaagttataacagaaagaaataaaggttaagtgtggaatcagggagaggagggggcaaagtttcctgagggtgatgattgagtcaatggttgaccgtgccatatctgaaactccggtaccggacataagaatcaaggaaccaggggtgagcaaaatgggaacggacagggaaatggagaggggagtgaagtgcatgacgcagtcagactcaaaggagaggatggtgatgccgtcgtggaagcagagaaggtccaagaatacattacttgcctttatatccctatgtgtgattttttattctggactcttaatgaagataagaaggtccaagaatacattacttgcctttatatccctatgtgtgattttttttttctggactcttaatgaagataagccaaagctttagctataccaagacaaattttcttccttgttggccatactagttttgttgcgtttgggtccttccctgtatttgattgggagaaggacaatcagttagttggttatatcaaatttttaattcaaatggcaagtatggctaaagtttactcatcatgaagcttaccaaaaagaatgcgagatagacaattgttttccatgtactcatatatcactatatcagtattagctggtttccctccacacaacatccacaaagcttaacaagattgggatgttgaagtccagatatcagtcccatctcattcacaaactcacgatttccttgtttagattttgaagaaagctgctttactgctatcattgtaccatctgatagtaggccctgcatcttgaacaaggtgtatttttttttcttgcattagaattacacagttacacatattcaaactactgaagtgctgattggtctaacaaatctccaccattacactttaaccatcatgtacgtggataatttttctctttcattaacccacgaaggttatatatgcttgctaatgagtacaaaatacattacagaaattatgattaaattgtaagcgttaaattagaattgaatggagatatagagaccatgaagtgtgtcttctatttcaaatccagtaacaaacaaattaaccataagatggaataggtaaccaagaatggaagatcaaaataccttgtatacacaaccaaagccaccttcgccaactttattcactgcatcaaattttttggttgctgctttgatttgtcttagtgtaaataaccccgtctgcagatctttgccgagctctgaaaataaaaaaacaaaatattggaaatttggattcaacaagaaagttaataactttctctacaatatctgccacatggttcatttcatttctatctagcatataaatatatagggcaggcaagtatactctcgtatgttctcttaataagccttgactttgatgaaatggagaaatatcatcaattacaaatcttatatagaagtaacttgttgcacttcagttttatgacatttgaacaaagtttgtagaaatatttatttaaacaaattgtggaagaagctcaggcaaatactgctggatacagaaaagatgatgtgttggaaacaaatggaaatatttgttctaactaaaagaattggaagaacttggtggcatattccataccattatacactggatctttgcctcctaaccatcccatcctgctcatgagaaccatcaccagaagaacaaccactaaaacaccagctactatgccgatggccagtatatatgacataaataatttgaacttggcagcttccgagaggcacacatcaatggttcggttttctcactccagaagaactcgtcctcatcctacaacgcgccagtatcaatgtacgtaataaatcataaataatttgatttgctcggtattaatcgtcacattcacatgacactttcatttggttgcattgcacacaaattcgcccataaaatatgagttatgcatagcacgatggttttatcagacgatatcagctgaatttcatcgcgttcggtaccaaatcaaacaacgccgaataacagagatagatagataagatacgtgttactgttattactacaattattaatgaaatttgtttagtgaatgctgaataatagaacattgaaattattataacagaaagaaagggttgagtgtggaatcagggagaggaggggcaaagtttcctgagggtgatagaggtgcgtttggattgagtcaatggttgaccgtgccatatctgaaacaccggtgcgcgattaatttcgtgtttccaacggtagcgtgcttctccggacatgagaatcaaggaaccaggggggagcaaaacgggaacggaaagggaaccagagaggggagtgaagtgcatgacgcaggaagattctaaagagaggatggcgatgccgtcgtcgaagcggaggaggtcgacgtgggcgcagattccttcgccgggctggtagacgttggcgatcatctggtcgaagagaggttctctgtggaggaggtggagggggaagggggcctgggactgggactgggcttgggcttggacggagcggcgtatggagtgggccagaggggtggcccaagaagggaggtgttgtaggccgaagcgcatggcctggttgatggaaggggaggggaaccaattggcggcttggatggaggagagtatgtgagactggcggcgtggagagaggaagtgacggcacagccatagaccattcacttctgtgatggcctcccactcgctctcgctctcgctctcgctgtagccatcagaatcagattcttctgatgatgacgacccgaacacttgctccaacactgctttctcctcctccgccaccctcatcttcctttcactttctcttcccgcactcttcaattcatgccacgcgcaacttacctagctgcgccattcatactttataagcttaattaaaaactgataaatgaggttttatatttttttaagatgaacatatatttttcagatcattagatctaagacaattcaacccataattttaacgctaacaaataaatataagactaactattctttataaatttagtttatcctatacttttactcttgttaaacaatgttacaagttaattaaataaactgtaaattaacttttaaatatcatgtcaattacaacgaattttcccactcttacttgtacgagatgctgcaataatggtggtatgccacctaaacctaaaaaatggaaacccttacttgtagttgctgttattacgctggaacaactcaaataacagtatactcatattttttgttatctatttttttatttatttagaaaccatttactctcaatcatcaatataataacttattttaatttcattcattcaatgcatgaagaaatggtttgttctcaaaatttgcaattgaagttacaccaccaacagctcctaatgtcacaacatttgtaccacttacacatgcacttagaccacttcctatccgatctgcaaatactcatatgcttagagtttcatttccaagttgaagtatctccaagagtgccaaaatcaagcttgatgagcttcatcctataccacatatctaactacctcaactcccttcaaaaggattcaacgtgttttaaacatattttggatatattttgaaaagttaggcattaacgtgttttagatgtattttggatatatttttggaaatttctattatgacattgacattgtggcatgctttggttgaagttttactactacttgagaacttcgatattttatgtttaatgaataacaattttatattttataaatgctcgatttagcttcgtaaattacgtgtatgttatcttattttatggatgattatattactaagtgtatgttataactttttttgtggactagtttatcagttaataatatttgttagggattaatttgttgttagtaagtctatatgtttttgtgaaaaaattttagaatgaaattttacttatgtctgttgtttcaaaaatcaatattttaaaaaaatgtgataatttagtccaaaataatatgaaaaatcattatgcacacatgttcttgttacgtgaacgagtgagtcatgtagactatctccaataacgaagatgaaataattttaacgattagaccagattattgtaacattttacatttgtgaactaaataaatgattttcataatataaaagtaaaattgtcaacaaatatatattttagggactaaattgagcatataccataccattaatagttcatggttaattaggtcctctacgaagattaataaatgataactactccgcgcttgttacatactgtaaaaaattgcaatcacaagtttcttaagttttttaatatttttctcggaagtctaaactcgtagacaagattatccgttattattagttaagagcgtatacgtctcttttagcttcagaattcctccaactccaaatcctccgtttttctctctgaattccaatagttgttgtgttctgaagagagaacatgtcaagcaattcagatgcagcagcagcgacgctgcatgctcgtggccgtttggccatgctcgctgctcacctcctcccctctgaactcactgatcacgacgccctccgccctctccctctctccgctcagttgccgccgacgaacctccacggaaatttgaccgtcgtcgacgacagaaccggcaagaagtaccagcttcaggtctccaaagaaggcactgtcaaagcttctgacctcaagaaggtaaatttcctcctcatccatgaaattttcaatttcgatctttgctttccaaggaatttccaatatttcaaactgggtctccaccaattctgctcctttcatctttgttgaattgtttgcaaagtgggcttttttcctattcctagttgcatggtgaaatcttagctgggatggtttgtgattatagtatgactgtttgtgcttacttaacattgagtttagtttttatgcatgctcagtgtaaatttacacttccaaccaataagaaaccatcttagcataaaagtcaacaaacttaacatacaagtagtctgtgattgaatgaaagtaatatatacactatttactcttattagtttagttattgttatgttatgggtttttttggatttgcagatatcgactgggaagaatgacaagggactcaagctttatgatcctggctatttgaacacggctcctgttcgatcatcaattagttatattgatggcgatgaggggattcttagatatagaggctaccctattgaggagttggcagagaaaagcactttcacggaagtgtcctatctcataagtgagtgttctgtttcactgcaaatgtgtgtatgaggcttctgtggcgcttgtgtatgagtagataaaacattttgactgaggattcacttaaacagattttatgttattgaagacacttgaattttgggcttagttctgcttcttgttaattatgtgcttcgatatgtatgtagcatgaattcttctgaaatttattaacgtgcatctttttttctgttttcaagtgtatggaagtttgccttctgaaagtcagttagcagaatgggagtttgctatatctcagcattcggctgttccacaaggagttttggtgagattttatgctttatctaaaccaactcttattgtgtttttatgttctccaaatcccatccgctaaatgataacttttttttgtttcagtcagtgacagcttttagatttgtaaaatatgaacaacttccactaattgttttacttcttgaaatttagtatgccagtggtattttatattgttaaagaaatctagtagctcttgaagtgatcatataaaataaaatagaaagattatgttgtttgtttctttcaatggagtttgggattattaatctaactaagtagtggtatcatcttacgtttattttgtaggatatcatacaatctatgccccatgatgcacatcccatgggtgtgcttgttaatgccatgagtgctctttctgtttttcaccctgatgcaaatcccgctctcagagtaagtaacaaaaactgctgtcaagtcattttttgttaataagttgaatttcaatacaaatttgtacattgtctatgcttcgagtccaaaggactctggagtgaatgagggggcatattagagatttgagatactgagatataataaaactaatcttgggattccttttggatgctactttttcctgtgggttactacaatgtacttgtgaatgatactctttctctaattaggtttcaacattgtttattgttattgctctgctatattcctttatccagatttgatcctttttcattattttttttttataattaatgcagggtcttgatatttatgacttaaagcaaataagagacaaacagataacacgagttattggaaaggtgtgcttatttggttcgttcttctcctttcactgttctatctctgaaaacatgcaaattatttagttatttgaatgattctagccctggttttactgattgtatcttgtgggattttgtccactatcctcgcaaccctatgattatttgttatgtgtcctactgctttattgccatatcatattttcacccctttttatttactgcagataacaacaattgctgctgcagtttatcttagaatggcaggaaggccacctgtgcttccatccaaccacctttcttacacagagaacttcctatacatgctagattctttgtatgtatggtatttttgtgcttgatcgttaatttgaattaagacaaccttgcttttttatatttaactttgctttatagactaatggtagtttgagttttgctcatatataacaaatccatttttgtttttaaaaagaggtataattcaatcttaagtgatagaatggtagccacatactagctgttttttagagttttaactattaacacaatctccactgtgcatactttcagcggtaatcggtcatataaacccaatcctaggctaactcgtgcgctggacattatcttcatcctgcacgcagaacatgaaatgaattgttctacatctgctgtccgacaccttgcatcaaggtagacatcttactgcaatactacttaagcaatataaagcaaatataaaaccgtcatattgctaaactatatatcttattcttatttcagtggcgttgatgtatacactgctattgccggggctgttggagctctatatggaccacttcatggtggagctaatgaggtagctataagtagttaatgaagcagtcatgatcttttatgtattgctaggttgaacgtagtgaataaacacaaacactatactgttatttaatatgggaacatgttaatgtgaccttcaattctgcaggctgtcctcaaaatgctgagtgaaattggaactgttcagaacattccagagttcattgaaggtgtcaaagccaggtggctattacagtattactttcttctgttatctattttttactctttccttagttgttagcattgcttataccctgaaaggatagcatgatacctgctcttttcagcaagcagagaaaatgatagttttagttgatatttttgtcctgcatttttcctccaggaaacgcaagctctctggttttggacatcgagtgtacaaaaactatgatcccagggcaaaggtcttacgaaaactggcagaggaagtgttttccattgtgggccgggatcctcttattgaggtgtttatccattccgtatttcctttgtctattgtctgttatatattccttgatcttggtatgctggtcacgaggcctatgatcagggctgtgaatacagagaaaaactactacatttaaaaaatttcctattgttttatttaaatgtatttttgtatttttaattttgattacagaatagtatgcttactgtgtatattgtatatgtttgtgcatacaagtttggcaccattgtgtctacatgcataatcattagatgtcttgtttggtttggaaaaaaaatagcagatcaagtcaaatgaagatcttaagacattaaaaatctctagcaacacctttcatttttcaaatttaaggtattactagggtttctggcactttttttttcctgaccaggaaagtacctatgtaatttatgtagattggtcagtatatggacttcaaaagttctaacttctgtatgtaattatttgatcgttcaggtggcagttgccttggagaaggttgcactatctgatgaatatttcatcaagaggaagctatatccaaatgttgacttctactctggattaatttataggtaatccattatttcacccagttattctaacttgaaggataaaaatatgccccctctcccccccccccccccccccacccaacaaaagaataccatacaaggcttgaactaatagttttatgcaatcagggccatgggatttccaccagagtatttcactgttttatttgctatccctcgaatggctgggtacttggctcattggagagagtccttggatgatcctgatacaaagattttgagacctcaacaggttaatttctttctttaaatcatttttcttgttatgattttcttgcatattaaaaatatatcatgcttactgtattgtgctaatgtagctgtacttgttgtgtatcacttgttttactggaaaatggttttcaagttgtatcatggctgcattatatttcttaacagtggtactaggcaatatttgcgtaatgcattagaactgtatggtaaacttttagagccacctataactaccacactcttcaattctacctgaagatatacaacatgataagaaacttgggagaaccacatgataaaaattagcagttgtagttggagacagggccttataactataccagaatcccatacttccaatgtgtgattcaagtcccttatcttgcaattgaatccaaacatctcatcacactttgcagcactttgataatttgattagttctaggtgaacactgcaatgttggcatcacgatctccagtgctcgtttgcagttgagaacatggtgaaaccctctgataccaatcgataagaagtttgagagaatcacaccacaaaagttagtcattgaaattggagagtaaaagaccttataaatcctacactagaactagaaccccatatttccaatgtaggacttaagacccaataccttgcaattggatcctaacaacatgtgatgcctttcttatttcaatctcttgcctagtttcatcatatctattttatgcttcaggtttacgttggggaatggttacggcattatacaccagtcaatgtcaggactacatcaagtgatgctgacaagcttggtgaggtggccatatcaaatgcctcaaagcggcggcttgccggatccggggtatagcttacaggctcaatttagttatatgagcaagatgaccaaaaggtgatatataattctcacgaacgtaaataattctttgttgatggctttttataatccaaagttaactttgctatgatcaggatgacatgtctgcataaataatgctactggtgtcacatccatcacctaccagaagaacgatgctggtgtgatttgttaagcctttatgtgcaagtcacgtttcagtacttctactttcaaattatttgttaattgttacaagggaataataaatagataagcatagtttacatatcccatgggagcagtaaaatgtacaattgattagcaaaatgtttgtgttaaagaaataagagagttttctgtgtaccagtacaaattatttcttccccctcccccctatagttgggtgcactaataaagaaaatatgctgaaattcaattagccttttttttcctctcaatatttcatttggactacgcggctaataatctatttttttttaaaatattttattaaaaacattttaacaatatatcaaaagaaatgttagtaatatattcgttaacatactttattgaacacttttttatcattaattaatatttatttaaaatcataaaattttgtacgtctcactttatttaatgttttacacatgattttgcagctttagataaatttaagcaatagagactttgttagcaatcctcacatgtaaacgtaaattataactaatcttttttttaaggcaaaaataagattactgaataaccctaaattaaggcaccccattgtgatgggaatagttccataaccatagctccaaactatgattaggaattacaaagtatatatggattttatgaatatcgcaaaaatatttgcaagcgggacaaataattacccataataataggactaagtaccggacaactggacaagtatatgcacaaatttacacggatattctgtgtgtgtatgtatatatatatatatatatatatatataatattttgtgaaaaataattatatttttatgataaaactctaagtctttaatctctaaccatatcactattagagagtgaaaaatactaaacctttaattagagtttttgtttagcgattaaaatattagctttagcaatcactatgttgtatgttattttttattttttttatttatgacttgagtttggacgtattaatgttatgtttgcttgttttaattaaattatttttatcaatttattattattaaccttatacataagtaatgtgcgagtcataggtgcgggtatgagtatataggtatcaaacgtgtacgaaaataagattaaaattattacctgaaagggtatgggaccaggtacgggtattatttttaaatgcgagtatagaaacatatactatagtaccttacctagacctacctattgtcattcctaattatgacaccccaaattttgtgcgaactagcaacaagataaaactctttacattgttattaattttaattttgtttttctcttttcttgcattgaatacaccacgagttttgtattaaatatgtggcattaagaaactaatttcagttgtctgatccatctgaattaacggttacaggatgatagctcttttctgtttcaacatgtgagccagaggaatcagtataaatactaggtattgatatgctatgtgttccgcttggattctgccagaagtgacttcttatactcttatgtttggaacttgaactaatagctgaatatcccggatccgaaagtagatcttgaatatcagtccaaccttcaagcatgctcacaacttgggacattgttggtctaagtgtaggagatgcattagtacataagagagccacatttagcaccaccatggcctcctcagttgaatattctgaacccaaatttggatcaatcagctccagaagactccctctctcttgcaaaacatatgcctaatgaaactcaaattttagaccaaattgatactaaaactctaaaaaaagaattacaatatatatatatatatatatatatgagcaattctagacaaataactacacgttaagattaaaagtgatttaacatttgccgataaaaaactaaaaactaacatttgatgttaaaaaaaagtgatttaatgattacatgatcactgaaaaatgacaactttgtgatttaatcttttcaaaaaatccctctcacttgatatgcccgtatatgcatgtgtgtatgtacgaactagtaaaatcaataatccataggtcttggtaatttagtatctattgtttgtttgagcctgttatattatgcattaagataaattctaattacccaatcaagaagataaacaaaatcctcgtttggcctgaaatttgtattgctctttccactgacagtttccagtgcaaccacaccaaagctataaatatctgctttgtcagttaaatagccacgcattgcatactcaggagccatgtaaccactgcaaaatgaaaaaaaaaaaagcatttagcattgttaaaataatggatttgactaagagtatactttacagaataaagtacatcaataaccatgggttaaatatttaatgcttgaaattataactaacttcatagtatgatacacatgcatttgatttttaccagaatctccactattgattaaaaatgggtatttttaccatggtttgatatgaaaacaagagaaatagtagcaaaatatgaacttacattgttcctgcaactcgagtgctaatgtgggttttgtcatcttcaataagttttgccaagccaaaatctgagactttagcattaaaatccttgtcgagcaatacattacttgccttaatatccctatgtatgatttttattctggactcttcatgaagataagccaaagctttagctataccaagacaaattttcttccttgttggccaatctagttttgttttgtttggatccctccctgtatgtgattgggagaaggacaatcagttagttagttatatcaaatgtttgattcaaatggcaagtatggctaaagtttattcatcaagaagcttaccaaaaagaatgcgagatagacaattgttttccatgtactcatatatcagtattagctggttgccctccacacaacatccataaagcttaacaagattgggatgctgaagtccagatatcagtcccatctcattcacaaactcacgatttccttgtttagattttgaagaaagctgctttactgctattattgtaccatctgatagtaggccctgcatcatgaacaaggtgtattttttttcttgcattagcattacacaggtacacatattcaaactactgaagtgctgattgatctaacaaatctccattacactttaaccatcatgtacgtggataatttttctctttcattaacccacgaaggttatacatgcttgctaatgagtacaaaatacattacagaaattatgattaaattgtaagcgttaaattagaattgaatggagatatagagaccatgaagtgtgtcttctatttcaaatcaagtaacaaataaattaaccataagatggaataggtaaccaagaatggaagataaaagtaccttgtatacacaaccaaagccaccttcgccaattttattcactgcatcaaagtttttggttgctgctttgatttgtcttagtgtaaataatcccgtctgcagatctatgcccctgagctctgaaaataaaaacaaaatattggtaatttggattcaacaagaaagtttataactttctctacaatatctgtcacatagttcatttcatttctatctagcatattaatacatagggcaggcaagtatactctcgtatgttctcttaaagccttgactttggtgaaatggagaaatatcatcaattacaaatcttatatagaagtaaattgttgcacttcagttttatgacatttgaataaagtttgtagaaatatttatttaaacaaattctggaataagctcaggcaaatactgctggatacagaaaagatgttgtgttggaaacaaatggaaatatttgttctaactaaaagaattggaagaacttggtggcatattccatacctttatacactggatctttgcctcctaaccatcccatcctcctcatgagaaccagcaccagaagaacaaccactaaaacaccagctactatgccgatggccagtatgacataagttcttttgccatcccctgatggaggtttaaaatctgtgcaagggaaaaatatttacttttagcttttgcataaatgaagaacaaaactgatagaactggatcagataaaaggaaagaatgatgaattttattgataacagaactctagtggaggtcttgtagaggtagacattaatggtaatctttcccttttcctacaatttttaaattcataatggattatggtttcaactgcagtcttatcaagtcatataaagcactaactctaagatgcatgatatgtgacttactagggtttactgaaatagcagatactagaggtccataaactcctcttgtgggtatgccagtggttccttttccagcccagtagaagtgaatcttcaaagtatgttgggtgacagaagcattaaatgtcttctcaattgacttgccagtaccaccagcttctcttcggatatcaaagtctttcagcactaaattccccttaattttaggacataataatatattccatatacatcaatgcacaactcagtgcaaatcaattatttagcatcatttgcaaatcaagcaagtaattgttacctggatatagacgtcaaatactcgccttccaagactgttaagggacctatcattgatgaaaataatctctgcaaagtgaagcttaactgtgtaatttccatttattaggcagaggccatagtatgtgagagcaaggggagaaacacgtgctgttgtgtatagttgtgaattgagtgcagagacattaagtctagaagtattggccacaatatatggatcagagtcaatatcattgtccatgaagtttccagtgctactaagagcccaatcctggctagtgtaatataacattgcagcacccttttgttctctgtcagcttcataaatattaccactaatatttgcttcgtttccaccacaattaatgttcagggagtactgatctattgaaaaaacaatgacaaacagggttgaaaagaaagaatactcagtgtaaaatctttcaaattgtaatggtctaatggtaaaaatagacaactgcatagaaaggtaaaattcgcaaagaatgtaacataatcaatggttgtaataaaaaagaataaaatgtcattacaatcattcaatggtggtaataaaaaaggatatcaaattatcttccagtttaagtttcttagaattagtcaacctatttatttcaaataattagaaaaggaggaaataagtcttaaccccttaagaaaaacagttatattcttgtttctctcctaatggacatttattccttcttacattattttgttttatttgaatttctgtacaactctgagcttaagattgttagcaaagaagtaggcagtgaacttttgcgtaaatagaatcataagcaaaatcatgttatatgactatcttaaatttttcttttggtatgaaatcatgttgagttgaaagtttctcatcaacttatttcactcaatttcaggtcacagaatttgagtcaatatttaaaccagcccatcagatcataaaagtaatttaaaagttgtagtatggtcacatacttacattggctaactgaagcagggcatggaaagttcctttttaagcatgaatgaatcttatttctgcaaccaagagagaaatttaaggttatattctagggctactaccaataaccaaattttacagaaaatattccaaagacaacagcttactgtgtatttacagatgaagagtagctctcaacaaggtttctggaaaaaaaaaaaaaatgttgcagtgataactgataactaattgaagacaacttttactcaaagcttaaataaactaaaactttacatgctcccgcgttgacattcagttggacttgagctgtcccaggagaatttattgtcagagatatcactgtgcaccaaaatatataataaaagatgttaatctcatgttgctaaaggagtgcttatttaatttcagatgcagacatcaacggcttgaagatcccagagagcataattttaaagaccaaaccggtgatcgatccagtcaagatattggatcaatgattaaataagtgagtcatgaattaactcacatgacccagtctttttttttttttttttttttttttaatattcattatatacaacttttaaaattgtaaaatttaatattattgaaaattattttttaaactctattgttattatattatattatattttttgtcatatatttcactgccttattcgctgtagccactgaagcaaatattaagatgaagactgaaaattgaaacataacaattcaagtatttaacgtacatatttttgttatttgcgaggacccatcgaggtatgatccctgataatttgttcccggtaagatacctgcattatttaatacattttgtttcgtcaaaattaaaaatgaaatgtatcaataacatattttattcaacgcatccacttacatgaagtctactttgtcaagttgggcaaaagattcaggtatctctccactcaagccattgtaactcaaatctctacagcaacgaagataaataaatgaacttgttttatgtaacgaaagggttaataattttatattataaaaaatgtattttatcttcaactttaagataagcatgttctacattttatagctgtctttataatcttccttcagtattattcaaacaaagtgatatggtgttcatgtaaagcaaggtctatgatagaagttcataagggacacatgaatcatcagagcaacaaccattcaactttgaaaaatcaatctacaccggaaagactatagacatatctgtttcatttttgcttctctcttaatgaagtttagtgctagttagtaattacccatgtttcacggctataaacaaaataataccataactgacctacaaaaccttgtacctggaaaaaaattatatttcagatctagataaaattatagaacattattatgagcgtagtgtcaatattataatttatatgaaaagaaggcttagccaactttgaattgattctatgagatcttctcaagtggaacatgatcctcaaagtaatatatcatgttgtcaaaactgttgtaagttacttgttgaacaacttacaaaattttcagtttttccattctcccaatatattctgggatttctcctttaatcatgcattttctcaataccctgcattatgatgtccaaataaaatataggtcaattttataaagacttcaagagaaagaagcatttaagtcattgaacttacagtgtcttcatggatttcaagttatttagtggtgggaaagctgagcttttactagcttttaggtcagttatcctcctaagtatcaaagaataaataaaacaatcacttaacatattcatcttctatgaccaaaacataaataaaataaagaattacaaacatacaaatcacttaatcttgtcaaggcagaaatgctagaaggtatgggaccctcaagagagcaaccgtgcatatgcctgtaaccccaaaagaaaaaagttaacatgataaagtagtctatacaacaagaatgaacgaggtaggaaacttacagcttttcaatcaatgtccagttactaatgaaatcaggaatcttcccaaggaaattattgtcacttatcctcctaaaatgtgtttcccaaaggttaatcagtatgcaaggaaatgtcaaaatttaaatgtaacaacaataaaagaacaaaagtgataaacaaagctacagattctttaattttgtagctccttatatgaattgattaagaaacctgcagtgacttgcattaacacctcactacctaatattaaatagaatcaaagtggctcatctttgtgtatctttaactgtcagattgtaaccatgtgctagaatatgttaaattgataagaacttacaaatcaatcaacttggttaacttggaaagcacgggtggcaatgctcctgtgaatccattggatgacagaatgctaaacaaacatgatttactcatgttaaaacactacagaataatatgtgagggggaaaatagaagcagatattgagattccaaatttccaataagcacacaaagaagatcaaaagaattacagtttttctaaattggtcaacttcccaatctctgttggaatgtggcctgaaaattgatttccttcaatactcctgtaacattcatacaaatatttaatttaaacaaagctgcagaaataaattggaaattatactaaaccaacaatcctggatcacctatgccaagcttcctttaggtaaaagcaaatatattggcaaaaggtaaaagctacctttagatattccaaatatatctttcacttcttttttttactttctatttttctttaaaaatacatccaatttatcactaagctaagtgatggagtaaacatacaattcatttgaaaataaagaaatgatttcaacatacaagtttctgagggttgtgatattggtgagaactttggggaatggccctgacaatttgtttcccataaaagagctgcacattcaattcacaagaatctttagtgtcactctcaagttgtttactgtatacagaagaaattgaagagacaatgcagagaaaccaaagggtgcaaagcagaaagttcttacagatcaaccaagcgcatggtaccccattgtggaggtatagaaccagtgatgatgttacgactaaggtctctgtttgaaagtgcaagacaaagttagtggacttcaccattccatagggaacatcatgcagagcaaaaaaaagtcatggtttcaaaactgagatttgatatcttacaattcttggagatgatgaagcttggaaaactctggtgagagactaccagacagattctgagccttcaagaatctgttcatttagaatatgaaataaaaagcagaaattcagaatttataattatatggtggttaacatgattattccaagatatccaatcaataaacaaatacagtacatgaaatgagaaaagaaacaatcttgtgagtcccttgtgtacaaaagttaggaagtcctcacaaaaagattaaatctaaaaaattaaccaaagtagaatttagaattaattcaagaatttaattagaatgtattgacagcaggaccgtgtttaggaattttagggcattagtcaaatttttaaagaaacttaatattatataaattatttcttaaaataatttttttagttttttgtgacttttttttaccaattaaactcatgtttatatattctttttatgaatagtaagacatttataagagtattatatattgagattttttttaacttatttttattttaacttttgaaaaccaagttcctactttctatttgatttttttctattactacaaaatataagaataaaaagtactaaataatataaacaatttttttataaaaaaaaatctgatatcaattaaggtattaaaaaatatgaaaaagagataaagaaacaatgagaatgttgaataaatgttatttttaattaaagaaattgataagtcatgcattaatatctttagcccttaatgctattaaatttttctatctctaacattaataaccatgttcctaattaatggtataattgcttataataaactacaaattcaatttttaattatatatataattttgatttttagttttttcacctctaattgttacttaagacaagtagctaactaactttttataaaacatcattgttcattgtaatttgaacaataaaaacagatttatataaaaacttacataataataagtaaaataaaattaaaagacctaaggtaatattttaatttccttgtactatccacgatcttcgaccttgattgacaatattaaagtatcttacagtatcaaacaatcatgaattgttatgaatgtcaaaattgctgactttcgtaataattatctaaaaactaattgtgttatctatgaaaaataatactacatatttttggtcattgacctgtctgtgagactagtgattagtaccccttctgtggtaaccatcaacactcaacagctgatctagtgttcagtaaaccctttcccattctttgaacataaattaatcaacatttcctatttaaaaaaatcaacaaattactttttactagacaaagttcgacgtaacaaaaaaaaaaaaaatagtttgaagcaaaaacatgaatgtatagcccaacagatgaaaattaaaaaatttaagaaaattttgacgagaaaaaaagataaagacagcacatccttttcaaagtcaacgatttgcaacttgcatcaggtcggttgagttgtcgattgagacccgtgtccgacatttcaaacttaatttttttgtatgttaatgagttctggtacttaaacataatgaaatcaacattatacatgataagtatataattaattttgtctctctcaaaaaaaaaaaattgtcacttatttttattttttatttttctggtatacatttattttaaaaatatagtccaagaaacattttcctctcttcaccaaaaaaaaaaaaaaaagaaacattttcctcttctcatttagtgctacgcgttactttgacgagtcacaaccacaaatgtgcatgattaagattcgcgatggtcaattttttgaagaatgcaggatatgcataaatctttggaaatattctaggtaaaaagaaaattagtagaaaaacacccattacccttttcttcctttttgcttcaattaaaaaggttcttggaatccagctatgaaaacatgaatttataactgaacaatttttttctcttaaaaaaaatatgtaattgcacgtgaaggtttgatggtaactttaggtgctgtctgtagtaataaataaaaaatagttgaagcaatatggccgtgaagattaattaattaatcaaaacttgaagaaaatcatcttcattttcctaagtgcacatgtgattccatgtgattatcgtccataatctgagttctcgaaaacacaaagaataccaaaaacttgattgaaacaaattaagagagagagaaagagcattacatgcttacaacatggcaagaagaattgtgattgaaggaacaatcacatatcacagaactctcaaagcctttcctagcattagacacattccaattcccttttccactgcaaggattcaccccaaagtcccagtctttcttcccaatcttgcttcctatttccttcaatgccttcactgcacacaattcaaccaactcaacttcatcgatcagagaaaaagcaaacaacattcaaatgagtcttacggtaccacagatgcatatgcatagaattatagaattagaagctatgatgaaatgaaacaaccaatccatgattttcttttgctgtccatagatccaaacaaaagaaatgagagagacaaaaccacttttgactctgcctcacttttgcaactctatgttccgatccaaaacatgggaaagcagaaaggattataaactaatgttatgaagtatgaactgatttgatacaagtataaaaagtgtgtgaacagcaatgagtgaaggaatgagttttacactcttgagtgttgagcttgggagtggctgcagaagccaagtgtgagaggaaaatcaatgaagtggaaccaaggaggagtaaaaagagcatcttggaataatctaagttggtctccatgaaagtgttttcactctttggtggttcaagctggaagaaaatgatagggagtgagtcagagactattatatgctatcagatgaggatagacactgggttgcataagtggtgatgttagtagcttttgtactctggttgggagcatgtgacaaaaaaaacaaaaaactatgccaaacccaatatgagtatttatattgtgcattgcattatttttattttttgttgtgaaaatatctgtaaaatgctcagttgcaacttgatggaagacaacttggtaaaggatccagagttaattctgatccttctgatgaggggttaatgcctcttatatcttgattaacaaccttcctaaaacagatctcttaatgtagaagtagttgaatagtcttgaatgaatcaattaaattgtttgtggtttagacttatatagtaataattttctggtgagtttctgctaatagttttaaatgtaatttaccccccacccaattttattactttaagggtagaccacccaaatcaattttactactagctttaagcacaaaccatcttacccaattttattacttcaagcataaaccaaaaaaagttacaaggaagaagggggtttgcaatcctatcgcgtgggaaacgtgcgtttgagacgctaaggaaaatgctcaaagttggatgtgggaaatgtgtattcaaacattaattatagaattcggattggttgcgttgtggccatatcttgatatcgcttgccttcccagggttaaaaaagaagaaagaaaaactccaaaaatttagattgagaatatttaaaattaaatcaagtctcctgttatagtagtataacttctactttcttacaatttaaaagtaactaaaaatttatttttgtgatttacatttgtgtggataagaattaaaacagagtaaatcattcacaaaaattataaaaaaattcataagaatcaaagatactgagaatttataacaattcatatattttgtataaccaattagactcctttggttgtaattttcaaatgtgtaacaattaagaaatgagcaacatagctcgaaatgatgagactagataacattttgttttcttttttcaattttcacaactccatcgagcgtcgtattgcattgcattgcatccaacgtttatcttcaattgaaagaaaagcacggtatttgatctatgtagaattgaccatcagaattcaacattagaataattggatctgttaatttaatttggaagtgttaaacgcactacataggtttgcatctattcatgattcacgtatctttgttatccttatggctaaatacataaagacttatgctgttgattttttatttaatattttaattgaatatatctcaacctagctctagtccaaatttaacatattttaattttgtaaagaaaaaaaacttactaaaaattttagaggaacgaaattcgaatattttttaattttatgagaaaaatatcatatttgtcctaaatttaaaaattgattttagtttctacaaaatataacgtttaattttggtcatcataaaattcaaaagcttaattttaggtcctcataaaaattaaaaagttgattttaatgctcataaaaatgtaaaatattatatttttatttttaatataatatattaagtaatattaaaaaaataacataatattcataactcaataattatttttttttatcctaaaagaagagttacggtgacagcggcactggaagcaattttgacccaaaactagctcttgagcagttgagccaacaaattaataacaactttttttctacacaaatctttcgttaatctatataattgtattatatctttatcactaacattcataaattattattttattcctataactattttcacaaatcatccattaatttttattatctttctttttattttaaaaaacatagaaaaatagttaaatacgaagtatccattttcttctaatagttaataatgttaatattacttccttcatttctaattataagatacttttcagaaatttatttgtctttttttataaaactattttctaatttttagattcattaatttttttttacatatccttaattattctctcttaaaatattaatgaaaataattaaataattagagataagaaaattataattttataatgatactgtaatgaattaccagatttaatgtaattaattaaattaatcattttcttaaaaaatataaattaattaaaatgattttataactaagaattgaaaaagtaatatattacattaataaatcaagttgacctcgtccatcttgtcccatctattattgggttttaatcgaggggtttaaacttacataaataaccttaacaaagttttgagatgcgtagaatcaaaaatatatctgtcgcaacccatccatggtcattcctaacaaagttatgaatattatgttgtttttttcttaatataatatattatattaaaataaaaatacaatattttatgaggactaaaaatcaaacttataaaataaaaatataatattttatgaggacaaaaacccaaacttataaattttatagtaattaaaatcaaatttaattttttaagggagaaaaaaaattatcttgtcatatgtgataatcatgtaccgaagtgaatgacacatgacagatattcattcaaaatgttcactgacgacatttttgatgaaaaaaatttaagtgagttttttaagttattttttatgatttttatagtattttttttttgtttttattataatgtcatgtcatcttaagaaattcatatacaaatttattttaatggtaagaaattttaaaaattttcaaaaaattcacatttttatattttttccacttaattataatttaattatagtattgttatgtgtagataaatattatttttattattaagaaataatttcttgcataagatacaaatcttattttatataaactcttcttattgagtaaaattgttccaatgaaaagaaactataataagaaacaaattttttacttaaaagattcttctataaattcttattaaaaatgttctaatacaatattaatatggaactttattagtcacaacaacaatccactaatattagatgtttgaacaaaaattaatacgttttaaatttttaggaactaaaataagacaatatattttaaaaaaatgaaaattgaacttctactactttgaaaggatgaaaaacatatagtatttatcctttttttagggaacattgcaatgctatgaatgcaagaataaagggaaaaaagttgtttgttattaaaaaaaaaaaaaaaaaacaacttgctaatataaaaggatgtgtctaaacgtttccaaacatttaatgcaagccttatatgaccaagacatgcatgattaacaattttctgctcccaaggaactataaattagaacacttgaagaaatataaaaaaaaaggagacatttcacattttttgtccaatacattcaaattctaagatactgtatgataatcatattaaaaaaatcataatcccaaaatctttttgttctaaaatgtattatttatctctatattataaaaattgattaaaagaagaagaatttctttatatattttttattttggcaatcacatagtttctttatcattgcaaccgtaattcagccatttcgatgtggtcaaagtccatgctccaaacatctttcggctcggtgggaggggaagttcaagtcttaagcaactgcgaggtaaaaaattatttaaattaatcatcaaaaactttatttaagtttaattcggttgaaaaatattaaatttaatttaagttaaaccaatattttataatttgaattaaatcgatttttccagtaaaaaaaattatatcgattttttattttctattttatgaagtagcaatactcttaatttgagaatctatagaaacaaatgaaaattaattacaattaagaaaatattgagcagttaatttgacctaatggaaccataactgccaagtattggcattttcccaacctagctttatcattgctggattgagactcctgaggagattattactttacaataaacatcataaggtattaatatttaagtttttaaataattaattgacaagtgcaaaagtattttttttcctgtaaaaaaagtgcaaaagtatttataaagataaatatagttttattatctgaagtgtttttttttctattgaaaagtttaggtaagttggatttctcattaatgttaaataagtcctaagaacatttatagagttatttacaaattattcatcaacaacaagatttttatacgaagaatgaaaatcaaatccacacgtctttttgtgatatgaaattatttcttatcaattagaccaatctttgttaattgtttatagttttattttaactttttaagtttccaaacatcaaagaatgtttaaatacagatagtaaattatgcttaacaaaggacatcgttaaaataaatgggatgggatacgcatgtggattaaatgttttttttatgagtgaaagtgatataaatggttaaaattataaattaaaagaaatatttaaattaaacttaaccaaccctccccttagggtgtatacgggttggtttgggttgagtttgacgaaatttgttattcaatttaattaaatttgaacggattgatttaagtcaatttttcaagaaaaagaataaaactcaatccaaactaatccatttataaatggtttgacttgggtcaacaggtcaaattatttaaatttgtctattattttttaaaatctaatatttttaaaagctaaaatctttattaaatgaaataccgaatattttacttataattattacttatagttaaataatggaagaaaagataaagagaggaatcacattgtctcatcatcacatatgctaatatattatattaaatatgatatacaaattgaaatataataaacaagtttaaaaaacacactcacaaagcctaaaaattcaataactaaaattattacagtatagtttgaaaatttcaatgttatcaaattatcaaaccatgagtagtataattgaaatttcaactaaatctaaaatagtttaaaacaaataaaaaaaaagcaaaatagatgttctatcagcagctaggagttgaaatcctaattttgtgagagtgcttgagtgaaatcatgagaactgagaaaaataatctcactcttaattactataagttttataataatagtaattgattatttaaaatttaaaaatattatatatatatataataacaacttaatataaattaacgggtcaataggttggatcaacaaataagcggatctagatattacacttataattcaatccaaaattcaatgaacttgaatgagttagattggatttgacccaaacacaaaaaatatctaatttaaattgtttgaattgatttgaattattttaaatttgccgatgacttgtagcctgacccctaactcccctcccacacatacgtataaaagtctacctgaaaggtaaaatttaatatggtgtttttttttttactagctattgcaatactagtagtagtatcatggatttatagctagctaatagtggttgaccagggtttgaagcttgaaatgttacctttaatttataggtatgaaaaggagttgaagaccaccttcgtttgcttgcatttgatgttaagtagagacattcctatgtctcaacgttcgaagggttgtcaacaccgcgcgaggactctctctatcagcaacagctacaaaaatattcagaatccgcactgtttcttttccaatgtcctacttgtgattcttgataaagtaataatgacttgcatataactctcaacagctaccagaaggataatgattcggagttcggaccaagggaagaagaaagtaacatttttgtgtcgtcttgcattggaaatttggaattaaggaggaaagggagatagcgtgtggggacatacaaaagaaagaggcagaaaataaatagaatagaacgcgttttaatttaaggaataaaatacaaaagaaagaggctactgaatgtttaatgctcaatgaagtctcacgtacgtaccctgtgagtgaaaagaatatcaattctaactcgaccattccaaattataattttgagaagaattgaatatgaatcactttataaaaatgatctataagtttgaaccaaaactatttttataaagtaattcagtttagttctttaaaaaaacttgatacgtatgaggaaaagaaaaaactaaactaaacaccgaaccaagttaaagttaaactagccactttatgatgaaaacaattttgttcaaaataaaccattttaatagagtgatttggttcgatttaaaaaaaaattatgggcagcactaatctacttaatgttgtgaccttggctgcattattgaattggagattgatatttttcgtattcatacgtacgtgcagtaatctaaataaagtgtgtttgttatcgagagagagtgcatgaagttgactgccactacgtacactgctatgccagctagcttaacttggtagtactgcaaatgcagcattccattttggactctactaactactaccatgcttcttcttttgacctaaattattaaactgctacttcgagctctaaatttcttgtggattcattgggtacgcgctatttcgaatttttgtttttataatactaattaaaatgaattattatcgtttcgtcatttatcatttctagaagtcgtactggtatttaacattaattatatttgcttgttacaggaagccagtcatgaccaataatgaatggctgggctgtaacatttaagttaaatttcaaaaaacacacacacatacacacacacacacacacatatatatatatatatattgctgttttctgttataccgatgcataaaactacgaggtagcgctatatataattagaatgaatggaaaaaaaagatttttgatttatgtttaatatatattttaaaaaaaggatatgcgatgtttacaggtacgggtcatccgtgaacccgaactgatctaaactatttgggttgggtcatttatgtatttgggtcaaaatcgaaccgaaccgatcaaaatcgataatgtagggattgtgttacggatttagatttatagatccgttgactcgttaacccaatccgtgaacctgtaaataataatataaattatatatatatatatatatattaaaattaaaaattatttttttcccatagtttagcatatgacccaattaatttgtttcttttgccaaaaaaattaatagaaacaacattttatttgttactaaattcggacaaaattatgaataattttaggcagtagtaatgtagcacaacaaatttttaatagataaatagtatacttatattttggttattttaaaataaataatattaagcccaacttttcacttctaataaaatacttgagttcatgtacatgcgatgttctgctcatttgaatttaattattagtgatggattgaaagaaattgacctatccattaaaaaaataagagttgcatgtaagtttgtgaagtcttctccaagtagatttgcaagttttaaaaggtgtgctgaagaagtaagtatatccactaaggccatgttaatacttgatgtaccaactagtggaactcaacttatttgatgttagatgttgctgcaacatgcattttatctctatgagtatgttgaagcttcatatgtgttaaatctcatatctagtgaaggggaaggatgtccaaaatagataggtatttggaggatgatgttgaagatgaccaccctgagtttgacattttgaattggtggaaattgaagacatccaaatattatattttttcctatatgactagagatatattggtcattcttgtatatactgtatcatctaagtctgcatttagtacaggggatagaattctggactcatttcgtagttccttgagtcctactactgttgaagctcttatttgtgtccaaaattggcttagatttactaagcaaaatgttaatgacttgcaaattgaaataaatgaagcggaaaagattgattcaagtgtgtaatctcttatttcattttttatatttgtataaatatcaattattttttgtgctaacggggttgtgtttaaatttttagagttgtttggtttgacttcaaatactgctaatattgggtctccaagtgttgaaactgcaagtgttgaaacttcttaatgtattactttcaagtatattgttatttgtttcacctttttttcatattttgtttatcgtgtttataatattaatgaatcattttctgttcatttgtttgtttcagcaaatctggttacaacaattttggttatagcaaagctcaatttgtaagaaatagttgtgaatcagactattatattaaatcttgttcaagaatcttttgttttaatttatattataagtctattttagaatattatgttgatggtattaaatgaatcaatttactactttcatacatttgataatattgtgttaattgtattgaatatttgaaagaatcatgatataaaatagtagttctaagaaaataaattaaaatgggtaacccattgaaccgaatcgaaccgatcatgaacgggttgggttgtgtttcaattttttttctaaaaccgaaccgatcaaatttgattaggttgggtcctaaatttgatcaaaatcgatccaaaccgacctgcgaacacccctaaatataatattaaattaaagttaattgaaatggtgaaattaaaaagacacaatagtttatgtttatgcattattaatgaaatttttttttatcagcagtactaattttattttattttgtttttttaaataagtaatgttatataaaatataggataagcgagtcaattcatttctaatcaatttggcaggcctgatccaacttattgagtatgatgattattgtttgagtgataatattttaattaatctaagctaacatattggttttaaattatggatagagctcatcaataaaaaaaatgggaaaaaaaagaactcctcatccatccactttctcgtttaagcataaatgcagaacaatggttataagattttctttatccaatagttcaaatgacactgaatttgaattatgttattttaagtaagattttggatttgagttttatgaataaaaaaatatgattgagagaaaaaaaattcactaaaagatgattgatcaaattttttaacgtagattaattatctataaaattaatagatatttcgtattaataatgggataaaaaaaaattgttaatactttacagaggatgtaaattgacggattgtaaagttatagttcatttgcagacgaagctgcgagaatgtcgtttacaatatgttatggacctggtttataagtcgaggcccaataaggtaatttagaattctcatggcccatgttattttcacatctcttttatttaagatcagaacttattttctttgaaatatactaaactataataccctacctttcccttacatcttcttttttaaaggacgggtaaccactatagtcccttaaaatataagggggtgataatttaattcctggaaaaacaatttttttgaaatagttcatgaaaatataaaaaaagtgtgtaaaaaatatcatattgttgtgtagaacattaattttaatttatatatctattttgtggactgatattattaagttataatgtttaaggattattttaatattaaattataatttttgaagatcatgttaacattaaagattcaaagattatttgaagtgggacgttacgttaaagttaacgttctacagttaataatatgaaattgatgatgattttttgcactttaggtttaggattaattttaccctttttatcgacccttcttttcacaattaacaatttagtggattgttaatttttaattattggattaattttttttatcatttatataaatttatgaagaaaatatttatacattgttattttagtttgtgaatattggttgtttaatttgaatttatgatgtgagtgtgtctataataggttggaccatcacatgatatcaaatgagacatcacttatctaagttatctcgactaataattataaaattgttacccattaaacaattttggatgatataatattatgagaaacactacaatgtaattttaattaaaaataaagaaatctgatgaataaagactacatgatcctactaaactaaacctaatcatcatcctaaatagtgagcaataagcatgatcggtgctgttgcaattgctctctcccactttgaacgttgaaggaataaatattgtcattggctatggcagtgacaccgacatcaaattatagaagaatttattcttatttatattataaactaaaattcatcattctcttaattagatattttcaacactttcttttttcttttatataaataataaatactaactttgtgagtttcagaatcataccccctttcagatagaagcatgagagcatagagacctgtttgaaattatcaaatatgattgatacttggaagtcgacttcaaccatgtgattagtttaatcatctcctacagagattcatccctcaatgttctatgtatcattttgtacggtatggtgtattaatgacttaataaattagatttcaaaagtggaacgtagaatgtgttggataatttccgtttttagttgattgataatcttatctttatttgataagatatttatttgataagatataatagatatcttttaattgataagatataatcttatttgatttgatggcttaaagcccagcccatttcaccctataaatagatgagtaagggtggaggcaaaacacacagaaaattgagagcctcaagtgacagtcttgagagcacatttgagcaagccttcatgcttgcatatttgagagggcgttgagatactccgccatttgatatttgactgcgtgagagattccgcagtatttgagcaagccttgtgctgtgcataattgagagatctctagagagagtttgagtgaaacactttagggagtttgagtgatcaccattgttggagaggttgagtgtaccaccacattggtgtatttgattcattgtaacccattattgttatagtgaatatttgatctggacttggtcccgtgggttttcctcttcgtgttgaagaaggttttctcccacgtaaagctatttgattgtctctcttgctcctcttttgatttccgcttccgcatttgatttgatatttgagggtccgtgattacccaacagtggtatcagagcccaggttcaagggttctgaaggagccgagatggagaccagtggcataactcatgacggagatatgttcaagttgaccgcagataacttcaactattggaggtcgatgatggaggatcatcttatctgcaaggatttatatgatcccattgttcttgaagaaaagccgactgggaagtcggacaaggagtgggagatcctgagtcggaaggccgtggccacgatcaggaaatatatcgacaaaagcctctttgagcacgtgtccgagttcacgaacgcgtacgaattgtggaacaagttagaatccatgattcagaagaagactcccaggaacaaagcacacctggttcgccggcttgtgaagcttgagtacaaggacggcatgagtatgattgagcacctcaacacctacaaaggtattttgaatcaactgtccaaagccaacatgaagattgatgacgagatgcaggctttgttgttgctgagttcactaccggaaagctgggatactttggtggtgactttgagcaactcggttccagaaggaaaactgacgatggatgccgtgacagacagtctcctgaatgaagaagccaggagaagagaacgaggtgtatccagcacgtttgaggctaacgttgctgagaacagaggaaagaccgactaccggggtcgtgacaagggcaagagtcgaggtggacgagatacgtccagaggccggactaggccaaaatatgatttgaagtgcttctactgtgggaaggtaggacacaagaggtcggactgctgggccttgcaaaatgatgaacagaatggctgtgtgaagccagatcagattgttccccagaagaagaatgatacgagcactacagctgtggctactaacccgaataccgagatattcctcctcagtgagaaaatgttgaacatagcccatgatgattgcacttggattgttgactccggtgcctcgttccacgtcaccccacatgagggattcttctccgcttacaggaagggagattatggtgtcgtgaagatgggaaatcaggtgaccagcaagattgttggtgtcggtgatgtaatcctgaccacaaatgtcgggtgccgacttctgttgaaagatgtgaggcatgtacctgacatgcgtttgaatttaatctcggtaggcaagcttgatgacgccgggttggtaaactacttcggagaaagtatatggaagctggccaagggaaatttggttatggctcgtggaaagaaaaatggttccttgtatgtgatgcaaggaaagacaattggtggagaaaccaattctgtcagagatggatattccctggagttgtggcacaagcgtcttggccacatgagtgagaaaggactccagatgttgagtaagaaagaactattgaccgggttgaatggccaagtgctggagagttgctcgcactgcctagctggaagacagcaccgggtttcgtttgtgagaccggatcagcccagacgacgcaagaggattcttgacctcgtccatacagatgtatgctccatgaccgagagatcactcggtggagctctgtattttgtttctttcgttgatgatcattcccgcaaagtgtgggtttatttgatgaagaccaaagaccaggtactccaatgtttcaaagaattccacacgatggtggaaagggagactggcaagaagttgaaagtggttcgatctgataatggtggtgagtattgcggtccctttgatgcttattgtaaacaagccgggatccgatttgagaagatgcctcccaagactccgcagttgaatggacttgccgagatgatgaaccggactattgaagaaaaggttcgaagtatgctatccaatgctcgattgtcgaaagcatattggggagaagccgtcagaacagcagttgacttgattaatttgtcaccatcaagaccacttgaagaagacattcctgaagaagtctggacaggtcggaaagcgacctatgatcacctaaaggtgtttggatgccgagctttagtgaatatccctaaagatgaaagggcaaagctcgatgagaagacgaaggaatgcatctaccttggttcgccgaaaaccgagtttgggttcagactgtgggatcctatcaagaagaagatagtgagaagccgagatgtgatctttcatgaagatgagactcttcatgatatctcgaagccccaagaccgggttactgtcagacgtgaagaacccgactctccagtccgaagagaagaacccgtctctcaagtgcgtgttgaagcagggggagaagctgatggagaaatcgctgaaggcgatgatcggctagaggccgacgatgctgggatccgagatgatgaagaaccgggttccgaagaggctgatgaagaacagccgagataccccactagagaaagaagaccttctatgaggtacccacctgatgaatacaccgtcattgctgaagatggtgagcctcagagtgatgatgaggccataacgagctcggagaaagaagcgtgggagaaggcaatgcaggacgagatgaattccctgcatgaaaaccagacttatgagttggcccagatgcaaggctactcggatgctgacttagggggagattccgactcgagaaaatcgacgacgagatatttgatgagatttgttggaggagcagtctcttggcaatcaagattgcagaagtgtgtggcactatggacgaccgaggccgagtacgttgcagaatacttagcaaagtgcacaccgatttgaactggtccgatatgatgaccaagccggtaccagcatgaaaatttgaagattgctgtgaagaagccgggctgatgaattcggcacattgaagccgagaaagaaggccgggttgttgaagttgaagacccatgtctcactgaaaaacggaagggggagatttgttggataatttccgtttttagttgattgataatcttatctttatttgataagatatttatttgataagatataatagatatcttttaattgataagatataatcttatttgatttgatggcttaaagcccagcccatttcaccctataaatagatgagtaagggtggaggcaaaacacacagaaaattgagagcctcaagtgacagtcttgagagcacatttgagcaagccttcatgcttgcatatttgagagggcgttgagatactccgccatttgatatttgactgcgtgagagattccgcagtatttgagcaagccttgtgctgtgcataattgagagatctctagagagagtttgagtgaaacactttagggagtttgagtgatcaccattgttggagaggttgagtgtaccaccacattggtgtatttgattcattgtaacccattattgttatagtgaatatttgatctggacttggtcccgtgggttttcctcttcgtgttgaagaaggttttctcccacgtaaagctatttgattgtctctcttgctcctcttttgatttccgcttccgcatttgatttgatatttgagggtccgtgattacccaacagaatgaacatctcacgatgcatcaggacattttctgcacaacaattaagttgtatatgaaatcaaaattaacccatcatctgctcattacattacaaatatatatacggcatgacatggctcatgcagaacaatgcccatttcttctccatctatatgcacggggtataggtatacgtatacatatatgtgctacaaatcaatattgctcagtcatactcaaactttaggaactataatttgtagaaatccatccctgaaaatggggaaagaaacaacaaattatcagcttcaaatgtttataggtacagcacatatctttgaacttgtgcaaaaccacacacatcacatactagtccctgaaattattcaagtcactttcgaccccatgcatgcatattttttaaaataaaatgatatgaagtcacatacaaattcagtaaaccaaaacaaaacaaaaaaagtacacttattttaagctatatggggaaaacttttcagttttcagcagagcagaatagaggagagaggtaggggaaagagttccccttgagtagatgtgataaattatatagcttttacattgagttgaaaaatttatgaatcatcatggcagtattctagctgccaaacaaagcattaggattggcatagattcagtttttttttttttttttttttttttttttgtatttaaaataccataatgatctaagtaccaaaacagtataaaagtgatggccatcattacagtagctagttgcagcaatagtgaatcagctattttagcctaacagaacattaaatatccaataaatttctcagtgaactcaattgaacttcaaggttacaatttgactctccattttgtgttagtaaaagagatcactaatgactagcctggtattgttggcttagcagtgtgatcgcttgcagccaaaatcttcctaatgtatgttaggtacctaggtattttattactacttccagtttgaactttgttagtaatataatcatttgagagtcctctgactgagccagaaaccaaagttactaaaaaattaaataatgcaatagaccaaattagatgaggttttatatatatatatatatatatatatatatagtttcagaatggagttaaaatatgaggctataatcaagagacacgtgcataacactaagatataacttacaaaaattcagctgatattctgtccttgttcacacccgcaggaagtggccagaccaccccatatggtccatatagtatttccctccgatgatatgaagaaaaggaagcatttggacaacctgcaactgtccaaaagctagtagagcgtctacctttaacacacaacctgtcacagttcacacattggctcttttatcacaaagaaaggaggtcctatactacgaaagctctatgatcacgaatgtccaacattaaaatttacatttagcgtttcacttccagaatttatgctttatattacaatgcagaaataatgtataaagtttgtattaatagacaagaccctcccccggtacacaaatgaaagaaaaactcaaacacaataatgacatagacaaaagtagagcatccaacaatattttgttttgccttatcttttccttcaccactcccttttctattgattagggagaactaaatgcttaataccacaaattgcaaagagtattacaattaatatgcgggtgtatattagagattcttcttacttttgttcatcaacctccactcttatgtcactgatactgacacctggaacttccactgtgataacatatttgccttctgattctgcaacatccatccttggagaccactcaattcctgcaaaaaacaaaggtcacaaaaattacagagtacatagtctatgcactggtttgtgattggttttttcatgttcgttcaatcacaagtgatttgttaacttttacaatattaccttaaaaatcaaattaataattatttcttatatgttgacaatataaaaaaatttacactaacaatgcatataaattaaactcaaaataatatacttcgatctgtttcttatagctattcaactattattacttcaaatgcctttccgagttcaaagttctaaccaccaatttcagaatagcacgttttcttttcagaatgtaactgatctcctctaatctgtctggttggcctagcaaatgtaggaggatcaagtgtactaaaatcacagccctgctcctgagccattggttggaccactgaatttgtgaaaactgattctgcccttgcaggtctagcaaaacatggtgctcttgcattagaaagacaatcagatgcagtagcaccatgatttgttttaggagcaataaaggaagttgagccaccctgaaagttagtgtatttgtattaaataagccagtgagaaatgaatcacttacccaaaaaaagtaaatcgaacactgttaagtatttcaataataagaacacttaagtacctcttcaattgaagtctgcctcataaaataaccaagagaagaagaagcttggcgtgcaaaatacaccttattatcacatctccggagtacagagttcagactgccactgcagttctgatagcggtaggaaaattgatgaacaaaatgaattacaaacaaatattcaagaaaaaaaaaggatagtacgtacagattaatttattagacattgtaaaacaaaagctataaaaccaaattaatggtctactaaaaacatataataaaggtgtagcacatggaaattctgaattacggaaacacttttaaatatcaaaaagggacaaagatgaaggaaacacttaagtttaaaaactttgaagttgcttgtagcctacaaaaatgcattgatttgataagagtgttcaagttattattgcctaagccaatcataaaagaaaagggcaacttaaacaattaaatttccaatgctgaacatcaagatcaataaacactttagcataataaatagtgacatcaactgtacaagctaatacgtctcctaatttaacgcaaatatgcaatatcaacggggttaaactatatatagaaaatcagacactgaataggtgatatttcccaatttattcaaagctagctgtatgagatgaaagggcatattttctcgtattcaaaaccaatgagcagtcgagctactttcatcctttagccactaaaaaatgaagtgctagtccactttatacaatactcaaattatatgcagtttgattgtcctacgatgacaataaatgaagattcctattagatggttttttctgttcacatgaaaaggagaacaagggccagttagcacaagatgagaaacataagttcaatttccccacttagctatatctaactcccaaataattcccatgtgtcgagaaaaacataactgaattcaaatgaattcctttattttccatcattatctagtgaaccatgaaccagccatgaacaaataagtaaaagaacataatatgttaccataggcagaacgttggtagttgaaatatcatcattgggtgcaaagtgagcagcaatcatgtgaattctgcgcttcacgggctcactctccatttctaccaataaaaatgcttcacaaaaatttgagctaaaaagataatgcaggatggcaccagcatcagagtatcaaaatataagcagagggagtcacaactgaatggaagatatttttaagaaaataacattagtggggcccattaaatctaaatatcttagtgaactgaagataatgtcagtcagatgccaccatagcacctggacccaaaatatcagtttgagactactgtagtctgtagtacttcttttttagaattttaggtacccttgattggcattgttttattattatcattattatttaatatttatttttaaaaccttacaaaaatttataattacccataaaaattaaaataatataatataaaatgaaaaaaaatgtaatagaaaatgattttttattgcgtgtcaatttaatactaagtaagttataaattaaatatcagtttattagttaaagaaattatttttatcatttatatagtgtatgtttaatttctttttgttttcattaaaaaattatggaccttaaatataattacatagtttactatgaaaattttaaaataaataacaataaataaaattagtaggtttttttttttactttaaaacaaaaatacaagcatactctttcttaattaatatcatgttttattctccataattattattttcctttattttattaaaaaccaatgaaaatatctcccacctggttgtctcattcgtgcagaaacaattcgtactatatatatggaaaattttacaaacaagataacccctctgtgcctgtccgtggctacaggtttgaattctgaacagtttttctctgaatttttttttggtgaaagttgttctctgaatgaatggccaaagtatagagtaactaagacaagaaataaagcagagtacaaagacatcgaagctgtgcaattctatatacctatatgcattgaacagaatatcacagaatacactgctgacatagagtaagtgcttatttgattgtcactacaaatctatctcacacgttacatgagttttaatataaaatctgtaactaaagataatcattttaatggctaagcacgactttcaagatagttatagtaaaaatcaataaactcatcctaatgatttgtgataaaataacagtataaaagtactttaatttagatatacttgtttaacaattcaaaatcaattctatcaaaaattctaaaacaaccaaacactagctagtaagtagtaaataataataataataataataatagaatagaaagaaattcataaccatattttcatttccaaagatcaaagcctttatgttctagaggggtaaatactggaacgtggcttgttttatggtataaatatctgtgcttccaaattcaaataatcaaatttaaccactcgagacaaaactgtagaagcctaacatttgttgtgagcattaagaaggaagcaactgagaccattaagtcaaaatgcagaatagaagcaaactacttaaacagacactaaaaaatggaaacgatgattgcagctttgtgatcaatacaaattattaaaacctgcgatgtgatgcttgtgacaaattgtttttgaagtgtaatattttaacctttagctagtgtcaagtgaaacagtttaacttaccaataaacgaaaagtgtgacactgatattgcagctttatcaaattagttaataaaaacttccacgcggatttagatttgagttgtgattctttagaaaagttttctagttttcttaggccacctatgtgaaagttttcttttcttgataatatttgttaatagatgctgcaagatttgcataatccccaatgtgtgtactctgaatcactcttgctccaatgcccctgctcctgctcaacaaaaagaaagaaaagcaaatgaatcaatattcttagctagcttgattctttgaggaagctccccgtggctactcatgctgattatcttcacagccaacataaggtgattcatggtgtacggtggcgatctatttttaatgttcctttgcgtaggaaattcatcatgtgactaatagcagaactttggctgctgcattgtttatgccaatttgtgtgcactaaaatatggatgtcataatatctgactcaatatatggtttgtgccaatttggtgtttcattgcaataggactttgggagcatttacagttggattgaatgataattatggaacgcaatgtcatcatctctaacgcactagatatgggtggtttttatatgctgtgggatgcaggggttctggtgtggaataattttttatcaattgaagtaattttgtcccaaaacttaaacactccttgtgcttggatattgttctgtctgttattaataaaaatgtagccttttcaaacaagggagcagagagttcaatcgcatttcaattaaacattatatggcaagcagagattaacttttgacacctgcaacttgtgtttattaaaaatgatttatgataaaataaattggcgtcatttcatacaagtagttgactccacccaggctcccagttaaaatcaaaacttgattgttgctgactaagccttcaaagaaacagaaaacaaagggcaagaataagaattcaactttactcgccacaaaactacaaagtaaaactgtagtctaattgcacctgcaacatgatatttcagccttctcagccaccatcttttattgcacgttaggggcctaattatagtcagaaatataaatttccaagaattgtatccaatataagataatgatatgatttgtgctacaaagatgacacgctagagaaagaaacataagaacgaatactacaattcatgtaataaacagaaccattgagtcattaattccatcaaactcactagggtactttacaaatgtcctcatattccacagctttaagtactctgccatcataggctcctttctcaatctgcaccttagcacaaaaattatctgtatccacccccaacagcttagcaattgatcctcgatatgcaccattgactatttttacacgccccccaacttgtggaatcacagtttcaagctctgcctgatcaactctgagcacatgcttgctttcaagcatttctatttccccaacatacttgtcaattaccttccggacaacgcccttttgcttgtagtaccccttctctgccaagactttgctcataatcttgacaacaattccctcatgcaaccaataatccttccgattaatttcttcctttttcttctcttcttccctcatcatttcatccaaagcagattttccacctccactttctttcctcttcaaattgtttctgggattcctttcattatatttctcttcatcaccctcatcaaacaccacccttgacgcctcatgtttttccttgaccacaggtttagctgatgatgacccaagagaaaatcctatcttgattccatcttccatattcagttccctcggaggctcaacctgagaaggctgatcagcctcagaagtagttggctgcatcatttgctcagccttttcaatctgtctcctgatctccttctcttgcttttcttcatctaccatatctgccttgattctcttattcttcatcctctccttgaaaagggtttctgaatctctatctatatatgtaatgaaccatcccttgggtgtttcctcaaccttacatttgccagttcgacccaagtacttaacaaactcagtaagcgtagcccactgagtggagttcatatgaacgtggtgtctatcgtttatgtattcgttataaactacagtggctgccacacggctgaatcggtgactgcgcttcatgtgctccagaaaggtggtctcaaactcttcggaatagccctcaactatcctgtgtgggttttgtccaaaaatctgcatttgacgctggtgcccttcactcatgcaatggcatttaaacccattctcatctcggcactgcttctgacacatctggcaataccaccgaagcttctgcaatccttttgctttgattcggttggcaattgctttaggtgtgagaaactcattttttcccatcacgaatctggatgtcacatttcagatcaaacaaaacgttatcagtaatcctacacactgtttccttacagctgaaatttcgttataaagcaaaaaagaacacaacaaaaacagcattagaacaaaagctaaaattcttaaagcattagaaaacaagaagcagagtactttggagcaagcatccacgttaaataactaatgaataaagttttgattagtatacaataaacaacttcactttttcgctcacacgttaattgaaatccttcaaggtcgaaggtcatcgtcaattggcaaagattcccagaggaacccaatgattaaaacaactttactttgattctcaacacgatgcaacaataaatcaatggtttttcaagcattctctgttccaacatctttggctcggtatcctattctagtttgcttacatctcaatttcttgaaacacacttctatccttctcggtctttcaatcacagcattaccaacgaagaatatcaatcgtccaatcaatatacaaacaacgaggggagagagagagagagagagagagagagagagagaacgaacctgaaattggcggcaactattccggtggtggcgttcgcggtggtaacggcaactacaattgcaggaaccctagatttgaagacggagagaaactaagaaagcgatgggatcggaaagggttttgtttttccgttcacgccgtgcttaattataaactagcttggtggaacgccatttataaaataaaataaaaaaatatattttaattactcttgttgtaaaaaaaagttgtattgattaataactaaatagcattttaagtaagattgataacttaaaacaagtaatatttattgacttgaaaattataataaataatatgatatggcaatctgtaattggttggcaacacaaggaaaattttaagtatattataagtgtatttttaattaattaattttttttagaggatttaagtaattaattttaatatactattgattgatatagacgttagtcaatcaaataaaatcctatgacttttaaaatactaatcacacaaataaaccgttttcaattatatggcgatttataatttattgacaacataataaattttacatttttattggctccaattaaatatgcatacataaaattgtcataaaaaaatagtgatgttaggctcataatttaatttatttgcaatttaagtcttgcttttaatcctcatagttttggttaaaaatttcttaacccaggaattgcaacgaatactgcgaatttaggggtatattttctgtgtggaatatctagttagaattcaattaacttggggtttgtttgatttggaaaaaaaaatgtggtattggatgggataattttttatgatttattactcgatacaaactacttaaaagaccaaaatatctattttttattctcttttttctctcttctagatatgttagaatgtcaacatcaccgatttttaataatccaccgagttcctggttaatcttcctattacatttgcgtctccacaatatatatagttatatacacactaagaaaaacaaagcgcaaataactgcagaaaataaaaaataaaatgatccagaaacattagcaaagtcataattatgtaatattaacccaaatgatatggggggtcttgtcctacactcaaatcagaacgctgtctatgcaatccggcatttttcacctgaaaatctacacagccgacttgtatgtctaatgctcaggttttagtagaataactccctccaatacataaagttgttcttctaacattacacattctcatcaagacatcagaaaaacaatccctaagaagagagtgattcaagacaatcagttcccaagtacaagctggatattgaattgcgtgcaagaagctcggagtccatatcttcagattaacagtaagaaacctgccacaataatttaaagttctctattactatatgcaagcagaattcagtcagtctcaatcaagagcaatcacgataattttcaaataatcagtgaatgtgctaaaagaatgcagtccaacaatgacaaaggtaaaagatttcacaagtgagacagaatacacaggaaatgatggagaaaagccatataaatcccttgttaagaatcttacataattctactatattaagtttaatatggaacgcaaaaaattgatgtttcgaagctaaataatattagagcagttaaaattcaagtcatagaatgagacaaggatgggacacaaatacagaccacaatgagacaataaccacaaaaaacaataggaaaatatatatttcatagatcaaatagaagaccatatcatcaccatatattttagacaatagaccactagcatctaaaatgctggttacagaagcaatgtcctcaaccatgctaaatcattagttaaaataaaataaatatataaattggacagtaattaagatgtcaacagtaatggatacattgattcagtgaaaagtaatttgaacatgatagaaatggttgtcaaactcacaagtcaagaaaaccagttgagttacattgtttttttttttaagaagaatttattagacgtgcataaattcactagttcatgagggaatctgacagtccacaagcttgagtcatgtaatttctcgccaaaaggcagtctagtgagtagcattgggtagacatgtataaattctcaagtccaagagcctgaaaatctactgtcctgtgaatctatttttcccaaaacacagtattttgacgtaacaaaatttactttttgtcatttttggcctgatttgaaacatacagttcacggctcatccattaccatgatgcaaatcaagcaacactgtagctaccgaaactaggatgaacactcttgaaaataggactgatctagggtggaggcatggggcatatattcagggcaatggcaaaaaaagtcggaactatgaatgtttattatggtgatgctattaaattatttttggatactatgaatctatgataggtttttttatgaagtaaactcttatcagttcaaatatcaagtcaatggatgttccaagactataaaatagactcatatatgactataacatgatttttacatagactcttgagtttgccaacattaagaataggcagttctcatagttgtcaatcccaaatattggctgagaggcagaccctgaaaatactatagctgaactgcgggatggcttttattctaaccaattagaataaaaagattaaaggataaactttgaggagagttagaatacaagataatacctgttttagagggattgaaaaacagaacatatgaacagaacaaagcaaggcagcaaaggtcacatttcgctggaattaaatggccgcataattctcagggatgatcataaactatggagagcagagcagaggctgcagatgttggggatggccaactggacagaaaatgctgagaaatactggatatgttcccagaaaaggatgggtttttggcagcgccaaggccgccatggcggttcttttttttgccaaccaccatagacaacaatgtgaagggaagcccactatggcagcaccatagggtgcaatggcatgtttatgtagcaaaatttggatttcagccatccaccattgataacactgactgcagagctattcaatttttgtaaaatgctccagccacaacactttgcgagcacgggatagcaacactatttggcactattgacaactatgctaaagcatgctcctttacaaaggtaaagggaacagaaagaattacacatttgccttaccaccatttggatcagttagcatttaatttccttggttagcgtttgcaaatagcttatactagtttgcaggaaagttatctttccttgatgatttaccaacaggaataacaataaaacaccaagaaagccagcttagcacttatctggccacaaataaagatgatgcatgatggaaaggcaaaagggtgggaacgtatgtgtatacaaacacatacaatatacatatatatcttctcttaaaacagtatataaaaaggtaaattccaaaattgtttatggcaaacagcatactataattttactctgcaactcaaaagtcacaatcatgtcgaattatcgatagctatcctaatgagtctagaaacttgactaaaaggtattgatgttaaattttgcttcatgcccaaacataaatttgagttggtattattaatagccacccacccggctccaacacccttacaaataaaaacaaaggagagatttatgataacaaaattagtttttccttgcaaaatgcatgatctcatcttaatcctaatttaccatttaattttccttctagacatcactatctctcacacaaaaaggaagagtgcaagatacacataaaacatagaatctgtgtctggatgctcagtggatggtaaacaaattgattccgcctcttgtcaaccatggttttagaaaagatacaaatttggtcattgtcagactagaggtgataaaaaataaatttgaaatttaagtcgcaaggtcaaagttaatttgagatgtccatggccacaattgtggcagacttgtccacaaattccaacaatatcaaggaatgcgatggcagcagcaatttaaaactttgatgttgaaaaatttaaactaaattttacatcaaactagctattatagtaaaatcaatcaaacataaataacttaaaaatcaattttacaaacgcacactcaaacactcacacacatacactcactgactcactcaattctgcaaacacacactcaaacacataaacagaggattgaacaaaacaacaaatacaaacctaccaatcatctctcccattactgttgctgttgatttggagggtttgggggaggaggcatgccagggcgaggaggaccaaacaccggaacaccgctgccaggtggcggtggcatgccagggcgaggtggtggtggagccggcattccggggcgagggggagccggcggtcctctcaccatctgtccaggtgggggaggccccatgggtctctgtccatactgcggcggaacttggaactgtggcggagggccaccaggtctcggcggtgcaaattgcccaggcggcatcggcggtggcggacccctcgccatgggaggaggagcgaattgccccggcatctgccctggaggcctcatcacaggcggtccaccgccgggatacgacaccggaggtgcgttgagctgcggcgggcgcgagatctgcggctgcatcatgccaggggcagggccgccgacaccgcggacagggccggcaaggcctggctgagcctggacgacgggagcggatgggatacctcttccggcggcgcggccaataccagcgccggcgagagcggcggcgccgactgccttggagcgggactcttccggcggaggagggccctcgacggtcatggagatgacctcctcgccgcggaggaggacgaggccgagcgtacggcggtcctcgcggtcgccgccttcggcaggcttcttgcccttgggcggaggaagcttgcggaactcctcgcaatcgccgaggacgaggttcatgtggcggtcgaaggccatgaattttcctacgagctggcgaccgtcctgaatggtgacacgcatacggtagttgatgtactgaagcatcttggaactcttcgacatcgacattttgtaaaaatggaaattttcttctgcagcagcttcttcagtgagagtgttttagggtttaagaaaaattgggaccttggaggagggaaaatattgttcactccatacactcgtttagaataacccaactaacactcttttatgggttgagcttcctgcaccattaacttttctcatacaccattataaaacagtgcatttccttaattacccttcccactttcacttctaattccgttatagtttgtgaggtaagtccgtcgtgttttaatgggtgcatttgtgtaaggaggaggcttttgtgcgtgtcgtgtgggtgtgtggtgggttgtttgtgcttaatggttgtcctagggtggtatgtggtggtcggcaatggcggaacggaggcttggatgaccggaagctggatacggatccgacaatccgcaggacatgcacggatccggtaatccgtagagacctcacggattgtgtaatccgtgcggttcacatggattgttcaatccatgtgaacttcacggattacacaatccgtgaagttcacatggattattcaatccatgtgaaccgcacggattacacaatccgtgaataataaaaagtgtcaaaattaattaaaatgaaatttaattttgataagcttcatctttaaatgtaaataaggatattttaatgaataatgaatgtttaatgaatatgatttttgtgtgggattttaatgtaagtaaatgttataatttagcgtgtatgtgtttttacaaggtatgttaaattgttttttgttttgttagaatggacagtgatgagtggatgtacgagagtataatgagtgaacatatttacatgaatgaagacattggaccagaccatattgaaaaaatttgaagaaatttgtgtaaacaatggaaaccacaagtaactgtgcaaagagcatcaaagttttcaaaagagcgatctatgtcagctagctacaataacaagttctcataacagctttcaaagtttcagccttgcaattacattatcgtattagcacatgttacacaaaattatgttaattggaagtatgacacaagtagattaagggcatattaagtttaatatacttctagctgccatcatatcaatgagtaacggcatattaaggtttaaaccactggaattcagaagcttcctacatattcaaaattaaaaccaaccaataaatccatttctaatcatatgtacacatgcaaattaactattttcactaacaagcacatatattggttgtttttccttagttatttatattggctgtttttccttaattatttttcattttttttcttctgaaaaatcctttttttagcaaatagccactgtacggattgatagatccgttggaatggcacggattgtgtaatccgtgcggttcacatggattgttcaatccatgtgaaccgcatggattacacaatccgtgaagttcacatggattgttcaatccatgtgaacttcacggattgtgtaatccgtgcggttcatgcaccattacggattcgggaaaaagtcattcattaaggccattttgggtattatgaaaaagtcaaatggtgtatgagaaaagttaatggtgcaggaagctcatcccctcttttatacagtgcaagatccaattaagttgggccaaggcccagagcccaaaagtggttttttttttatataaaaaatgagtcttttcatttacactggcataaaaattatgattagataagaaaaatattaattagaggataattgtgattaaataaagaaaattattttttacttttttatatttcttttgttgataaattatattttaacacaaattgaataccagtgtagggagttttcctttatatattaactttaaatgaagataaatagagtatggccttttatattttatttttctcatccatttgtgattattttatatatattttttcttttttaggaagttattcattataattgtttttcagaaccctttcaaatataactttttatgtgcatgtttaggtctccgctaggagatcccaaacctaggtttgtaaaaataattcctctaatactattggactcaacttacgtttgaggggcttccaccagtttcccaaacatgctttttatcttcattatttatgaatgtgctattagttggagagcaatgatttaacttattcttgctttgtctaccaaaaaagtgaagtatatatatatgtcattaacaaaaggagttgaagaagatacgttaatcactggaatttgattttcgatttagacattgaatcataattaaaaatattattttatcctaatatggtctaatatgggaggaggagagttagatgagtattaaataagaagtctcgaatacctgtttgtcacacaaaaaaaaatgtatgaaattataagatcttattcatgatttgggtttgaatatgtaaatacatattttttgttgagatattcatagtgcattgactttagctaaaaaatcaacctatgatgctgagtgaatttcgtgagtgtatgtaatttgttttccataaagaaatagccacaacagtcaatccaattgatatgttgactaagactttgttttctaatcaaaagttcaagcatatattggatttggtaaatgatcgtataattcaagacccttcagggttagttgagaggatagtatttttggttagttacgatttgatgtgtttgtatataacataagactatttatatgttatttgtgcaaaattatatagtttcatattttgtctccctttgagtgtaggttacgttgatcgaaccaacataaaatccttattttttttctctctctctatctactcctttattgttgtttatgaattagattgtctaagtttcatatgagtttaataacattgagtatatttacaattacaatcaacttaactcatcaaaatgaaggtaatgacaaaatgaatgatttgtaattaaccataagaaaaaaataagataagatggtgtttgatttgagtgttttttgtttcaatttttaaattatattgtcctacatactctaattcatatagtagattataattaaattttattaatatataaaaatatttattatactgtcctacataatctcatatatacaattgattagtaaacactatataattagttgattaatttaattatcaaattattattataattattaattaatatattatatataatctatgttacttataattgattattgattgtaattatgttaattataaatgtaccaatctatgttaattataaaaaaattaattaattgattaatagattggtaatataaaattatttttaatgaaatataaaaaatgatagcttaaaatttataataatataaaaattacacattatgaagtttaaatttaatatcagtataacgcatgtgattttaagctggtattgagagaaaaagatagtttttgaattttgaactttgaagataaaatatatatttagttacaacttgttaaatattatgttgatattaaaaacataaaaggatacattaaatgcatattaatactgaacaaaaaatcatgttatgcctttttacgtaacttctatatcttattatatttcatcctatttttgctcatttttgttaaaataacgatgcatagatattttatgttatttgataagagagaaaaaataggagaattaattttagttataatgataatatgaaatatgatatatacaaagaaagacttcattattattttactctctcaacttggggattaaaatgttttagtcttctaaatttctttttaatctttcaattttgaaaactgccatttttaatccttttcatgattatgataattttaaaatgcaaactttggtagcttaaaattaaaaatcaaattatggaacctaaaaatcatcacaaattatcgatctattattctcagcttggcaagagcctaaaacgaaatttaaattaaaaaaataagaccctaaattagggagttaaaacagtaattatgcgtaaaataaataaaagaaaataagaagcaacaaactatataattaatgaatatatgtgcatattactttttctaagaaagtccacatatcacatatttcacttaagaagtaaatatttttaaatatgctataagtattgaatttactgtttcacccttttgatgggagcagcaaaacctgtatctgcgattctctctctaccacttcaccaagcccactgtttttatcatctaatttcgggttttattggattaaatttttaagagattattttagtataaaaaaatctttataaaatttaaagattatatatgaatattatgagttatcagatttttttataagacttttatgataatttgaattttaatagatttatatcataagaatttaatttttttttaaaaactttatagatttattagatttaaaaggattctataaaattttaaaaatacattcataagagtttagtgaaaaaataataagaaataatgaggtttggataaaaaagtaaaattaatatattttttaattttttaataactatattgattttagttttatgtcttcttatattaacatcttcttattttcacttttgaatttaaaagtagatttaaaattatactttggttttttattattttaaaaatattaaaattattttatgataaatttaatgatatatttaaatgggatgcaataataaaaatatactataagagagtagttagagtgaaaaattggtaagagagttactaagtatgtggatgatgaaattaaagatgacagtcacaaaaatattgagttgaacaagtgatgaatataatatggtaatttaattagaaaacaaaggaaaaaatgcagagaaaaaaaaatataattaacattttttttatttcaaaagaataggagaaacatatgatacacacatctttaaaaatattaaaaagagaaaaaaatacgtgtgatgagagaaaagaaaatatgttaatcaataaaaaaataagaaaaaagtccaatagaattttaaaaatttggatgaaattatttgataaatattttatactaaaaagtacaataaaattcatccaaattttaaaaaataatctatcaaattttaaaaatttgaatgaaattatttgataaatattttatactaaaaagtacaataaaattcatccaaattttaaaaaataatctatcaaaattttgatagatattttatcctaaaaattatgataatatctgtcaaaatcttaaaatataatctatcaaaatttatatgtattttttaacaaaaaactttttataaattataaaaaatcataattaattaacactaaaatttattatttttttaaaaatcttaaccatcttaattgaattctaaaaagtttatttatattatttaaaaatatttaaaaatcctgattcaatctaaaaagtttatttataatactttaaaatatttaaaaatcctgattcaatctaaaatgtttatttatactatttaaaaatatttaaaaatcctgattcaatatatcccttcgtctcagcatctcccaaaacagattcctagtcatcgatccttaaaaagtttaccatatcttttctatttttatgcttgatcttttctaaattaaggtaacaacctagtaagtttatcggattctgccgcagtaacttcgatttgcactaaactaaacatctgaggatctcagaggggcatcacattcacattgagccaaatcatcacagcaacattctcaaatcacataaaaaaaatagtgctcagtccgtgagagttcgtatcacggctctgacactgacacattcgcacgggatccctactttcttctctcgtttttttattctcccatcaattgtttagcaacccattaaggttctcgtcagaaagtttagatttttattgttagtttttaaatatatttttcatcgtttcatcagtgtgatcgcacaccatgatttgcaccgtgaaacaacccgccatatccatcagaggttctgatcttttcctgcgtaaaaagtgttcagcttcaaccccagttcagtcatgttcccttgtttcaccttcttcaagggaaaaaaactctctgagatcattggtgtcagtgcaaaagccactgcacctttctcgtgttggttttggagatttcgttgggtctctggtgaggcgtgagcgtgctgatttcgtgacatgtgaggcttatgaggctgatagatcagaggttggaggggctggggctccatcagaggctgctaagaaggtgaagattgggatatactttgcaacatggtgggcactgaatgtggtgttcaacatttataacaagaaggtgctgaatgcattcccatacccttggcttacctcaactctctcccttgcatgtggctctctcataatgttgttctgttgggccaccaagatagttgagcctcctaagactgatcttcagttctggaagaatttgttccctgtaagtgactcacttttgtttgtttcctcaggataaatttgatgggagaaaatgaaagcatacttttttgtttgttcatttgttataatttacgtgtacttgttctggggaaaacattttttttaagaactattttgtcccatgttttgatatatatatctgtgtgtgtgtgtgtgtgtgtgtgtgtgtgtgtgtgtggtttgacttcagggaagcttgacgatttcatgaaaaagagaaagagaaaagttaattcatttaaactatgttgatgaatgggaggaggtttaccagagagattttttttttaacgatggaaatttaagttttggaaaggttttagaaaattgtttgtgacagtgattttggccgcaatgtcaaggcttttgtggcctttgtggctgcaattcgccgcaatatcaaagatcctgatgaaacctagaccgcgtctgtgaccgcaatttaattaagaacttgaatcgttttggcttttccccctatttatttatttgtttattaacatcttgatatggattgggaccttagtgtttgctgttttcccccgcaggttgctgttttacatacaataggacatgtagcggcaactgttagcatgtcaaaagttgccgtatcattcacccatattattaagagtgctgagcctgctttcagtgtaatggtttccagactaatgggcgaggaattcccagcgccagtctacctgtctttgattccaatcatcggtggatgtgctcttgcagctgtgactgagctcaatttcaatatgattggtaaagaagttgcttttctaacaaaaaaatgatttgttatctaattttgttctattttgtattttgttgttgaacatagtataaaagttggatatgagaagataatctgagttgaactaaaaaatttgacccgagagaagataatttgatggcaagttattgattaaggcaatgtcataatacccttccccttcttcctccacaagcaaagtgattattactggaattctatgtatatattttaattattatgtgttcatgcttgtgttgagccaccaacggaatggatgatttactattatataagattcttgggtgtttatgccattagcagaggttatgatggaatgtacataacttttcatcttttctgcataggagtccttcacaccctcctggttttgatttcattactgttttattatatttttcaggttttatgggggctatgatatcaaatttggcatttgtactccgtaatatctattcgaaaaagggcatgaagggaaaggatattagtggaatgaattactatggttgtttatctatgttgtcccttgtaattctcacaccatttgcgattgctgtggagggaccacagatgtgggcagctggatggcaaacagcactctctcaaattggaccccaaataatatggtaattacaaaatgtctactctatctgatgttatctatgctatgtttctgtaaaggtgatatcttgaaattgtcataaattcataatattttttttccgacaattattgtcggcatcttgtgtccttttcagaaattcaaatttattggatgttgcgcaaattattagttcatttgtttttgtaatgtgtacactatctcagagcaggagaaggtaaggtggaagtggttggattgtttatggaattgctttgtagttattagaaattagagcaaatcttttttcgtataactagtcatagatgatcaacattaaaagctacataaaagtagcatgactaaaaagttgcatgatttttgttttaaatcttaattgttcttggttattttgagaaatgcaaacatttcattataaaaatttgattttaaattttcagttcaaattgtttatttaattgtaaacctcacgtgattttttcctttttaatcaaagatcatgtgagattggaaattaaatatgcaattaacagtttatttcaatctaacagttgtaatccaatgttttcatttctcacaaaaattaagagttctcaccttcacatacacatatgctgctgaccgtgaagctggtgtgaaacctgatttatgtgtttggattttcaaacgggaaattgacctgagttcttttgtttttgattttgagttatctaatattcttgtcctttcacttgtggttctgaaaatcttctgcattgttttgtcttatgattaaacatatggctgctacttgtgcacaacaggtgggtggcagctcagagcatattttatcatctgtacaatcaagtgtcatacatgtctctggatgagatctctcccttgacatttagcattggaaacaccatgaaacgtatatctgttatagtttcttcaatcattatcttccacacaccagttcagcctattaatgctctaggagctgctattgccatcttcggaaccttcttgtattcacaggtattatctagatgagaattttctatagtgatattttattgttaactattgtgccccttggccatatcatgcactaaatgaaccatatacatgctcatactcttacctcttattggttggagccttggaggatccttttcaaaggttgtattaggttggttttggaggctagcttcaggggtgacatagattgtgttgttagacattgggtgattaggtggaggaacctacactgtctaatactagtgtgcaaactgtcttggaattatacttcaaaagatatttggtggaacaatttgattttgtaagtacactagaaggaaaaatttgagatttatagtcataggttagaattgagtgatggagctattctaaattaggtgatctgatttttattaagtagcttcactttgaattgccgcctatgacctaactgctattggtttgaacccaccatagtttttattccttttctaaatctatgttattacgaattagcatatcaaagcttcaaaagttgactgcaccaatccatttgttcacatgtttagtatctttttaaatatagtttgttgtggagggccttgaaatatcaagaaaaagattggtggtaagaaagtaagaaacagagtactgactatgtggattgcttataatgtggttttcttttgaaaacaacaattttagttgcaggtatacacaatctctcattctactcattttttgcaggcaaatcagtagggttgaggaattgagaattatccccgaacttctttacatgtggtcatacaaggtcaccgataaggaagttagttttggaatgtggtagctggattatggtatgatgacacagctgtggaacattattattagagattattagttttttgcccccctctatttctgaattatcattaagtttgaggaataaacatctgtatttgtttggtctgaggataatttctcaagacatgcatggcatattataataaggttttcttaataataatcaaagtacggtgatcttgtttataatggtcgttatgattcccattaatgcttgctaacactagtgaagatgctggctggagctttaatttatatttttgggtcattcttgctttaaattaacctttgattagcagatggaggcccagttaactgccccgtgtccgtgttgctccgtgattatacttctgtcctatttttttttttatcgataaatgttattcgttagtttttgttagtgagcgaattcgaacttacaacatcttttttccttcaaccaccaaatcaactttataattcttacttctgcactacttaattcatgcactgtcaatctctctctaggccatctaataataattggatttcggtcaattttttgagaattaatgaagaaacataatctaatgtatttataatatttttaatggcttgaagattgctcacctcacctcacaccatcagacaatttatgagaatcattactttggggtgggtgattcttgtatgtagctttggtttttgctgtgtctcaaattgagctaacatagactcagtgaaagttgtatcaggagcttatgaaattttgagtgagaaatatgccactgacaaataatagattagtaatatgagactaatctcatttaaaaaatgaacttcatttcctaaactacctttcatgcttactgatgaaatacttcaattttaggagaacttgtttcgaatgataatactttctctattttgaaagtcatacgattcatatcgcaataatataaggttgttaaaaataaaatctaaattaattaaagaatattttagaaagaataccattaaatagagtgaaattaattaagattaatttgtttatattttggatcaccacacttaagtttagatttacttatcgttgaatctagatagtagcataaaagtttgagcgtccatgtctatatggtcactacaactaacaagttccatttgaaagaatcactcttatgtatgctgtgaacctgataaatgtaaacccaaaaaagagatggcatgaggtggaaggaagaaagagaaataaagaaaaaagagagataaagtgatagatgtgatgaaaaatagagataaaactaaaatgaaaaagagatgtatgaaaaagaaagtgtgtaaattgaatattttcctatatgctatttctaggcatgggtgtttcttcattttgtcaaatcacttgtatttactacatgtttgataggaaaatacataagatacactcatttaagccttgagtctttgaagctatatatattcatgtagttttattgagactaaagtgtttaattctcgtgctcaaacaaatttctttgggttggatggaagtgagactcagtgctatcaaggctttgctttccaattgtaacatgctggagagtttgagttttaaaaggtgttggaattcagacaagtttgacctaggtaaagaaaaacacatggatctgacaaagctcgtcctggactaatgcggctttgattttgattatttcaaagtcaattactgaaacaaatctcaaaattttcaagtattgcgggtggatgaactttgacctagctcatagaaattgattcactcgcaatggaagagatagatcttgatttctctctagaatattcatttgaaggatttggttatcctatctacagtttcgtggaagatgtttgtactgctaaagttttgactgtaagtagttttgtgctaaattcttcatgatcatcaccttttcctccctcataattaatttgtcaattgttatcatatattagtactagttttataattatgtataagtgtatagttacgcttatagtccatgataactttcactcttttgacgtgctccatttctgtttggatgaactgaaatatggattaattacaatatctatcttatctaaattgttttaattaacgtattgtgtgtgatattttaaggtgattcctactggtcccgaacgtatggaacctgacatggatgtacatgtgatcatgaagatggccttgcaacataatgagttgtttgtgagtatcaattacgtaaatccaatttgtttttcctatatacatatatatgtgtgtgtgtgttaagttttgaatttgcttttaacacatcaatatatgttgtggttattttctattaacaaaaaaggagtctaatttctgttgtatattgtaggattatgaaccaccgttttattttaacagcacacaattctggattgaatatttggatgtttgtgaatgattgagttcaagtcgagaagtggtggaaattaatggctttagaggaactctaaatgaacacctcttgctcaagtatttgatctttcgtggatttgtcttgaaaaagagtagcataaacatgttgaaggatgattccggtaagactgtggagtctcattgccgtcaaatggcagaaactcagagatatcaatcttttaacacatagttaaggaaattacactcgtatcccttgtattttactcaaatttcacctgatacctctctcttttttcatattacttttacctccttctgttaacgcagttaactaacatcaattaaaatatgtgagcagacgaaattatccttatattttaattgtaaaattaaaattatcccctcccaattagtttcaaaatttagggtttacctttaattcattttccttattcacaagtaatattcatcttcctcttgttggcgagttttctttaatgtccacagggtgcgagttcctcttcctctcatgaagttcacgttctattcctcttcaccattcatgagttcttcatcgtttctcttccagtacgcgagttctccactgttcctctgtttctctttatgttccacgatttctgttcacactagaattctgcttgtaagtgactattgaaccttgtatatagattctttttaagaatatttatttaattttgattgtttattgttgtctatttctgaatggggtttaaatagaggatcagtttgggaccacttatgatatttaaaatcatttgtttatcattattgactaaaatagtattgatatttgggatgaactgaaaatcatttgtttattattattgattaaaatagtgttgatgtttggttccataagaacacaaatgtaggaacaaaatactaaatttgaagcaaatgattatattcaatcagagaaaaaaactgaactaaaaaattgaagaagaagaaggaagagggttaatactgcgtatcaagaaggtggattcacgtttaacaaaaagatggattcacatttaattagagaaaaaaataagagtcttaaaatattttcaggttgagaggaagaagatgagggtattttaaacataaaatttcattaaaagtcatatgaccagcatgtgcctattttctgttaaattattaaacggtgtttaggatggagggggtctgggtgtaatgtgagctaaacaattaagagattttttgtaggtgcaaaaaggaaagagtataagatgaaatttaagcaaaactaggggttgcggatgtaatttacattttgaagaaagtgtttaaatgtcttgaaaaagtactctatctttaatattattttatagaaccttcaactttttattcaaaaaaaaaaaaacaacttaccatgttatatgtttaagtgctaatcctggtctttgttgttatgcatttttagtttgcaaacgttacttattaatacaagacatttgtctatattatataaacgcattttatttagatttcacagatttcattagatgcatatatatatatatatatatatatatatatatatatgttatttaaaaaattcattttacaataatagcttttaattgtgtttcagcttaagatttttcattcttttaaggctaaaatttagtatttatgtgcattctaatatcaatatatatatcaagcgtggatattgacagatacaatctaaaagctatgcagatttatgttatgtagtattttatcaaaaggacaaagaatcatgaagacagaatccaagtttgttgcttttatggcaagagaaataataatttttttttctttttattgagatagtgtaatctaaaacaaaattgatatactaacttggtagaatttgcaaagtgtttttaacttggggtaagtcagggagcaagtggtacttctcatctatggcttactttttttaaatttaaattatagtaaaaactttataactagtatgctactaattataatatatatatatatatatatatatatatatatatatatcaagtcttagacatttttaggcttaattttatttttgatacattagatatatcatgatttagtgattttggactctgaaggcacagttgcgtgaattgaatcttttaaatgtcacaattaattatgcatttttagtctttttttcatactttttttaaaatatttaataaatttttcttatgtgacactaaataagcacatgtcgatgaagtgacatttaacatgttatttaaaaaacaaattgacatgtcttaattatatttctagtattttatgtatcataattataagtgattaaaagtgtaattatgtcatatcagtcatatagaagttattgatttaatttacattccaaaatatttcttaagattttaatttgtggttaagtttcaaaattctaaattaaaatggtatatatgttaaattatttttcaaatgatattaaattcttaaatttgatttaaatacattattttaccatataaaaatagtattattaaaaaataatatagaagtttttaaatattttatcttttataactaatactgattttttaattaatattatatataatatactatttgtaaattatctttaaatttttttatttatgtttaagtttcaaagttctaaatatatatttattaaattactttccaaataatataaaaattattaagtttattatttttaccatataaaaatagtattattgaaaaataatatagaagtttttaaatattttatcttttataattagcattaattttttaattaatattatatttaatattaacaaagtctgactgacaaatgatactaaagtcaaacataaaatatttcaggtaataaaaaaaaaaggttagatagtgaaatacaaatggaaaatattacacatatggaaaacatattaagccaacaattttttctttatttttgaaattcttattttaagttttaacattaaaataaattttaaatcaaataattcttagaccaaaaataattttattgaacttcttccatcccaaaataagtgttatatttaaaaataaatattatcctaaaatcagtgttatgttaactttccaatttaatatcaattactttttttcaataatactcctaataagtttaatttagcttttcaatataacattaataataagtttagttttataaaatgaattttgtgattctaagaacactaattaagaaatcaaaaataggaaaatttatattgaaaatcatgcggagtgcatttaaatatcataggaaaacacttttttcactgtttccaataatatatattatcctcttttactttcttaatcttaggatactcattaacattttttttttataaaaaaattactactctttttttatctatttattaactttctttgtctgtgtaagaataaaaaaacagactgagatttattttgaaatgaatagagtaatttttatttggatgagaatttttacacaaacaattaatatttaaaaattagactcttaaaataattaatacatgtacaactaattaattaatcttaaaatattaatgatcctacactagttcacatttatttgtttctctttcttcttttatttgccctcacattctctctttcttcaattaatacacacacaaaatttatataaaaactgatcatttactttatgcaacatataaaaactgtaaacgtaggttgaattcattaaaaatatttgaaatacaaataacaaatgtaaagtaattgattgcaaatatttcttaaaatttattgctaaccatggaaaccattgaccgtaaaaaaaacaatggaaaccattgtgggacttgaggaaattaattaatggatatatacaatctacaaaaaagaaaaacacaaatgaagaaaacaatcccattaaaattttatgcattttcaccaaaggttgccttcattctaaatccaacagtaatatattatagtaattaattaatatatatatttatgttttcctaaaaaaaattctaataacggcaacgtatacatggaatttacagaaaagaaaaaaaaaatacaaaaatccatatagaagtatgcaacattgttttctcactgaagcaacgtctgttgcatatataaggtagcactcattggccatttcacacacacatttcaatcccattggaatatttgaagaaaaattcagtaccctaatagtcttatccacatctttattatcaatcaccatatcatatagctagaaccatggcaatgagcatctattcgttgccaatggaattgcttataactatcgtttcacttcttcccttcaaggaagctgtgagaacttctatcctctcgaagaaatggttggagttgaacgtttgcaagttcacaaaaaacatagagtttgatgaactcttttttgttaaacctgatcaacctaatgaaacaagagaaatccaaagaaggacttttcttgacttcattaatttgtggattgaaaatcacaaaggaactttggtggagaagttctcttttaggttatgaaatcctagaaatgctggtgagatcattgatcaatgcgctgtttttgccacagaacgtggggtgaaggagttggaacttgactttgctgatccgaactggaatgaaaattattatggtaattatgacgaggcgcagtttcaattgccagcacgagtttaccagcatggtagccttgagtctttgaagctatattcttgtagttttgttgagactgaagtgcttaactttcatgcactcaaagaagtttctttgggttggatggaagtgagactcagtgctagcaaagctttgctttccaattgtaacatgctggagagtttgagttttaaaagttgttggaactcagacaagtttgacctaggcgacgaacaacataagggtcttagaaagcttgtcctggacaagtgccgctttgaatttgatgttttccaagtgaacgcaccagatctaaaaattttccagtactgtgggttaatgaactttttcatcacggaaattcattcacactcaatggaagaggcaaatattgatttctctcaagaatatggcttcgaaggatttggtcatcctctttataatctggtggaaaatctatctattgttagagttttgactgtatgcagttttgttcttcaggtatacattcttcatcaccttttctctattgatattaatttcttaattgtacgttatcatatattctacttttataattataactttcagagttccactcttttgatcaatttgttccatttctttttcactgaattgaaatatctaattacaaaatgatttgttgatggtttcaattaacgtttttttgtgtgtgatgcgataagattattcctaccggacccgaactgctaggttttcgaagtgacatgcttgtgcaacatttgatcttgaagacggctttggacaagaacgagtttttgggaatcacattcttcctcaacagttgcccgatgttagagtgtctcaccattgatctatgttccgaaaaaaatttgtttgtgagtatcaatcacatacattgaatttgtttatcctttatatatattaggtttttgaatttgctttgcctatatgtgtggttttaaaatttgctttgcctatatgtgtggttttttcatttgaaaaataaaaaaagctgctaattttttgttacatataatgtacttaggattatgaaacaccgtttctgtttaaccgcacgcgattctggagggacaacgtgggagtttatgcaagcttgagttcaagtctggaagtggtggagattaatgggttctgtggaactgagaatgaactttttgtgctcatgtatttcatcggtaatggggatatgttgaaaagggttagtataaacatgttgaaagatgattctggtaggaccatggaacctcgattccgtaaagatgcagaatttttgttgacagttccaagggcttcaagaaacttggagatatcaatctgttaataaattagtaataatattttaatttgagagtattgtgaatgtgtgactgggtgctacattaaatgttagtgtataaactcgacaacaaagtcgatatgatgttataacatctctttgctgctaagactttatttcactgatttcatcaagctgtgtattcattttttagatttcgtaagtttaattacatgagggtattgaatttggtggttacttaaaaatacgcaatttacatcagctttatatgacatagtacttgttttcttttcttaggaattgtgtattgggttcctattgaacacgggaggaaggctaactaaatgttcctttaattaatatatattactttgcgcatttctttctctttttaaagatgaaaataaatataaaataaataaaaaatgaagttcttaaaaatatataatatatttatattttttacataatgtaaaaaaaatgtaaattaaaatgatatttaaaatttcttttaaatgacatgctgttgcatttgatgaaaataaatatctttctaaaaattaaataaataaaatttgaactttttaacaagtcaaatttatatgtattagataaatatcaaaattttaaaatataaactaagaatattatatgaaactacttttagttgacatgatactattgctttgttttttatgtaaaaatatattaaaatgaaggttacataattaaattagattaacgattattatgaaatcaaaatattaatattatggttcttaatatttcaattgaagttatatatatatatatatatatttaatatagactattattttaattttaataacaataataatcaaattattattattatagtatttaagatttgaaaaaaaaagattgaatataatcacatataacttattatttaatttctatccttaattattaatttaaaataaaattatatcataaataaaatattactatccaatattaaaattatatataaaaataatattaatgtcaataacttaacttttccttaaatgaattcaggaacattaaatttagttaaatttaacgactattataaatttaagtgattcatataacgacaaaaaaaaaaaggaaaatttatatatatatatatatatatatatatatatatatatatatatatgcttttacaataaaaacattcaacataattgcatcactataaatcacattcaaagatattacatcacttcaaaatcaagacaaatataaacaacacattacacattcatctaggttttactctttattcagttattctcactcgtaatactataatttcttagaaatattgaacaattataaaagaaaatgtgttagagagtaacattaaatgaataaaaaaaatatcatacaaaagttatatggaaatagaatttctcctttatcagggcacgtagaaataaaattatcaagacctgtgggctttgacctcagccacaacaggggtaagcctaaagacgtatagtcaaaatggcctatatattgagacatgtaaattaggtatctaggtggtgaatggtgataggtcccagccaatatatatgaaaaagttgacttgttttctttctttctcattctattttttattctcctttgtcctgctatatacatacgaatcagtgtgtaaagaacaatttagaagtcaattatgggttctccaagtttcaaatttcgttccactgtccatggtaagttaaagagcttggccatgataaacttgaaaattttgttgacatttatgttgtgggttgcacttgaaaagaaaagggttgccttcatcgcccttgcatatccccttgcctgtatttatgtgacgtaccaggttaaacattgaaaaaccaaggaatgtgataaaaagttgtagtattaactttatttaaagtgaaagtagtgaactgtgaacacatcactgatccgactttaatcatgtaagccccaaagttaatgttaaacgcggaaacatggaactttcataaatgacacatgctgaggttccaaataagactcctatttattactagaagaattattctttgttcccgagtcaataggtgaaaatgaccaaggcaagtaaagcagcccccatccatatatgtactatgattaagagaaattaagttaccaaaacctaatttgcagcagtaattgttattatttcattgatttacctctgttacaattgtccattgcacatctgggggaagtctaacaaaatcgtcaaacttggttcctattagaattggaattgcagtctgcaaattgaacagattaaatgtcatcagaaatttcataaaaaatacgtcaaaatcttcaaaatttggatattatcagcctaaaacagaatatttagttatattaacaagccattttgatatcttgaaaaaatagtataccccggcaagtcaataatcagagttcatttctctgtccagtcttaatgaaaaaaattaatgtcactttcctgtggatactcaaaccatttgcactgctacttcaaaatttctctcgtgttttacaaaaagagtttccatgccaaaagcctttggaaactacactttaatttaaacagtggcagacactttctgaaataaaatcaattcatgtaatagtactatatataagccctgcaaaattattttttacggtaccttattccactgtcttgcttcactataccatcgaacaacactgcacgaacataacaaagtacaaaaaacgcaaatcatcattatttctaccattacgtttctaagaagtaagaacccttcacctaactcatgacacagataatagtatctcttagcctacctatttagtgtacaacgactggtgagatcgaacataatcaaaatcgcaaccgcatctttacaagccatgggaatttgatccaaggaccttttatctcctacacacgccacataatataaagtcaccgtcaataagtcaattaactcaaaccaacaaacccagaacactaaaaagaatgaaaactaaaaagtatacacagacaaaacagagaaaaataaagggaaagaaaggtaaagtttaagcaaagaacctgcaacatcccatattctaaacgaaatacgagctccttgaacagacaaagttttgtccattagattcaatccttccatctgtaagcttctcttttcttgctcattccccacatacttgatctgagaataggaattcacataaccacaagctagttaattagacccgttaaaataaaagactactacacttgaccaatttcaaaagaaataaataatatatgtagggagaatctaatcacaaactttctcatatatagtaaatttgttaattctcatgataaacaagcttaagaattttataaaagtaattttttaatattacataaaaaaattgagtgctgagagtattctggttgagagttatctactaatctttggagacaaaaacagtctcttatatgcatagacctgaaattgaagcctgaatacaagcttaagattcctgtttatttgttaattatgtcataccatgttgataatgatgtaaaagtttttaaatttctagtacacacttgttaaattcttccaaaaaccaaaacaaaaaagaaatggtaaagttagaaacatgctgaccacaaaagtagtttttccaatatggcaatcacccaacaagctgatcttgaggttcaccaaatcggaatcggagtcatagtcgccagtagtggttgcaacggaggagaagacgtcgtcaacggtggccagcggcgaagaagaggggtcccggagggctagtttccggtagtgagatggccttccggcgacagagcaaacaagaagtctgttccaaatgaaacggaaaaagtggccaacgaaagatacccttctgaggacaccccaccggacttcgacctgaacgattttccggcacagctgagacatcttcctagtggtgtcgtgaatgatcttcttcgccatcgagcatggtttcttctcggtgaatattcacataacagatagatagttagtacctaatcttcttctttgttgttcttcttgttgcggtgcgtttggtctattagtctggtttctcggtcccactgtttaatataggggacagttgaccggtatttttcatttcggtttcctaaactctccgtattgccgccttcttggtttctgcgtagagatgggtaatatggtaaatgaacctgtagtagggggtgtgcaaaaacctattccttacaaaaaaaaaaaaaaaaatcgaaccaaatttattctaaactgttttaaccgattcaaaagtccaaatagtcaaattattataaataattggttcgaaaattgaattaattttaaaaattaattgtaaattgaattgattttgaatcagttttaaatcaattttaagaattgaactaattttgaacgagttttaggactgttttatttttataaaaagaaaaaaactgatttaattggatgaaaattggtttattaacaattaggttaaccgaacctctttagtacaataatatagttcttttttaaaaaaaataatttaggtgaaaattggttcgattacaactcgatcgattcagtctgagtgttttcttgcacacctttaacctgtagttgtagtattatttatacaaatatatttttataaaagtaagaaaaaaatagcactcattatttttttatttttttatcacatcatattttttattatatctttttttttttctgttttctttcttccactcttagatgtcaaaaaggttcatggctgttcaagaatatttgtgttattttatctcaaacttatcccttctcttatcattttatttcttgtataagaaatcgaacaagagtgttatggggtgtggtatgagagaagtatatgtatctttctcaattgtcatgatgcattcggcatcttatgaggatatataggataggaattgaaaaaccgagtgtgatgaggagttatctgctgtggagagggcgcatgatgtgaccacgtagcgtaatttcttgtttaattcccgtgctttaaataataacattcatgactgaaagagttggaaattattttattttgatatttcttgctgattattattagcattctagtattagtttgaaattgaattgaagacatgatgagaatgattacatgtattaaaggattgaaccgttagtgaatggtcacgttcttctcaaaataaaaaaataataaaaatacgactgcactgtttaagagtttctaaatatcagaggttcatacttaatattctaatcatatttatcctttttgaaagaaaaaaaatataaaacataattatatctttaatttgaattaaatattttataagctaaatatatttgttgaatataaagaatattccaccccattagtacaatgtattattattaaaataaacaatattataagtatttgatttgatattaagattataaaattaacaatgtaccaaaaaattataaattaaaaaccaatttgaaagagtgcagaattttttattaaaatattatatattttatattttaaagtttaatacattttagcatgaaattatgaaaatatatactgttatttaataatagtagtaaacttaaacgcgtctaatatttaacaaaatatctactaaaaaaactaaacatttaatatttaacatgttaaacacgtctagtatttaataaaatatttaccaaaagaagcaaacgtttgttatttagcatgttaataacacaaaaaattttatttagcatgttagacacgtctaatgtatgtgaagttaaacgcgcttttgaattagttttgctaaagtcaattacaaatgataatagtaaaattaattaaaaagaaagaaaataaaatgtttacatttgattaagttgatttcagactaatttaaaaagtgaagaatagaccatgattagattctactagatttatagtatttaactaattttcacattaggaatttaagggagccacagaaccgctaattatatttgggtttgtgttattattagtggaagtgggtacagtataccatcaatttgttggtatgattagacaaattacagattgctgctctgattggtggatctgaatctactgatcacactgagagcaaaaaagtgaaaactacatttgataaagaaaaaggctgctgcaaccctgcaatcttcctatcttttccctgacaccaaaatgtatgattcaaatttaaaatatacattataaaattcaaattaaataaccaactacacatcagatgtggacatactatatgtatatgggtctcccaattggccatgcatgattctcctttaaaatattattacttgcaggtaatatttactcaaaattatactatagatttgtagataacattacttacaccagcgagaaaagaagtaaagtaaataaaaataggatagtaaaaaaatagaaataagagtaataaataagaaattagataaaattttagattcttaattaggtccaagataagtaaaagtaaaagaaaaaaatatattatgaaactgtttgatttggatagaagaagaaaagaggaattagattagatataaaaattctattccatcattgtatataaactctaaactctcacatatgaatattagatagttataggatccaatttgcaggacataatagattatctacgcataatacattattgggggcatacataacaaattttagtgtgcatataatcgactatagtagcacaaataatagattatcagagcaatggggcatgcctaacaaattatcggggttattgtaaataaagtagagaagttccgttggcttagggtgccttttagatccacgtacaggaagattttcacgttaatataaacactaaaatgacgcagaagctacttgtaacagctttggataaacatggatccagtatatattaacgctaatccaaatatgctgttagattttttgttatttcatcgctagttcacatcaaaattaggatttaggattcaatcatccaaaaaatttcttatttttttacttttttaattatttaattagttaatttaattctatttttatttttaaaattatttttcttaattttgagtgttttgacatatcatacgtctcgatccgatatttttattaaaagttagactatttgaaggatatattgtacgcttaaatcctaattttgaggcacttagagacgtttttttggaagaagaaaaaatagtggagcaaatctccttagggactttgcctagggtttcctctctgaattttaagtgttttgacaaatcgtacgccttcatcggacaattctatcaaaagttatgaccgtttgaagttttgagattttttttttctattgacacgtaattcgttgggctcttcagcgaaatacctcatgtttgccacgtgtcctgctcgttttgatcatgtatttcgctggcccctgtaacaaaatatgtggtcaccagaattacgtcacgtcagctcacatatttcgctggactgcatagcgaaataggcaatgtgacagtctggtaaaatttactgtacgcgtgacatttagacaatatttttaaaaaaatgtggcacgctggtcgatgacccaagatagagaacaccacttcatatctaaaacctatttgctattaatttattgtggaatatttgtaattccaaatgttgccctaaatgaacctagctatatccatgactgaccttatactttacttagggatgctacccttttttgaatgtggtccatctataaaagtttagactctagagcaaggtatctagctaaagttttattgattaattatataaacccaccaacctatctatctttaatatattttatatattttaatatgaatttattttgttagttacatagatcatggagttaggataatgtaatgaaatgaacgaaaaggttctcaccaaactgacattagtatatatatgtaaccactgctaattactatataagtataattaatttcgctaacttacacgtaactacgaacactgtcgttgataattaggtttactaaattgaactcaggatcaactaactagaattaggtttactatagtttgcgttagatgttgatgcctagaatacgaacatacgtgttgacaaacagaaagaaagtgaaatgcacacgacttggaattatgcttaattgcaagacctgtaatcggtgtaattgagtgatggggtcctttgtaaattgatttttgtgttatttgatcgtggaagtttggtaaagtttcaaagtgggttttgtaaaagttggggtttttgtcttcctaaaattcaataatgcgtgtattgtacgtgaaatactttcggtgggtttgcatatcatctttatacaatttaatttggaaatcttgcacacttcatttgttgagaagaacctcaaaagacacacttaatagaatgatttttttttaaaatataagcactcaaataatcaactatagaaccataaaaatttaacttatttaattttctaacaattgtttttcttttcaaattaagtttttttaaatagtacatatactcgtggatataataaaagaaatagtaatattggttgtttctacatttattattaaaattatttgaataaaatacagtgacctaaaaactagcatgtgcatgtcaagactttatttcttatacaatgacaatctcctgtatacaatcctgcaaggatctcctctacttactcaatagtttattatatcttgtaatacgtatgtttcacaattatcgtagaagaagaaaaaaactcaattttttttatggcaaataaactcgattgagtgtcaatatctgaaacactatcgtcctcaaagggatttttgagcttaaaagagactttttcttccattagttttagtccacaataagctttgagaaaaaaatcttaataagtagggttttaatataatttgataattagttatgtttaacaaaaatacttgatgaatcaattggaagttataaaaagttttaaatatacatgtttttaggttgaagttgaactcttattattttttatttacagatcaaatattgtattaaaaataaaaataaattgaattaatatagtaacaaggaagctatatatgagaaattttattaaaatattaatgataaaaatgaaaatattatgttaaattatacgctacaaattacgttattttaagtagaaaataaataaacgttataagctaatgagataaatttcttgatcaaacacgtatactttagtcaaataaattcataaagttattagataactaaaatagtttaccaaactcactgaaagtgacatttggttgttaattaaataagattaatgtggaaatggaataatacacttgatcgaattcatggatgagagtaactttatggaaaacagaataaagcaaaacctcattttgacacagttttttttaaaggttgtctataacctaattaaaatgaccaaatctaacaaattattcccagaacttctcaatttgttcacatgttttctctaaatttggcgttagccattaactctcccactatttatttttttggctttggtctcgtcaccaccaataaagaaaacggtttcatgagttgaggttcctgcctattatttccttataaacccaaaatgaacaacgcaatcaggaattaattggaaaaaaaatcacttctcttaaattagaattcaatcactattcctaatgtcctacaagccgagcgtacatacaagcatgagcaaacacacgacacaaataaacctacgttttttttttttatattattaatgttatgaattaagaaaaataacaaaattgttctcatatttcaactagctgagcaaatgctttctgacttcttttctaatttaaataaataaataattgttaattgttcaacactccttacacacatttactaatgtgtaaatattaagattttatttgaataaatttatttataagagaagaaaataagataaaataaattcaagttctttcaaaagttaaaattaacttttacacttaattgtatagaagtttgttttttcatttaatttctataaaatttatggtgcataagttgattttagattatatagaagttcaattcattttatcttgttattacactctttctagctaaatttttattattagttgaactttatagaaaacaccaaattgctttggtttcactttttatttaaagaaagtttttaattaatcgataaaatagtgtatgagaaaaaagtgtgttagataatatcctgcgctaacactcatctatatttggtggtcagaagaaaggtgttaggatcaactgttagttagctttaagccttcaaccgaataatacagttagttagttaaagtggttgtacatagattgggccttgaatgtccagttcaaacaggcccagtttgattcatgggaccttggacgacgatgtttcaagaggatttttgtcatgaaagtgaaaccaagcagaatagaaagttcagaatgggcaactgtggacaagtgaaaaggcaaagacatggtagagcttcttctacgagcatcacctcctccacctcacccttcttcttatccgaggtaacaaatccaactaatatgtccccattttcatctttagcaatatttaatgttctaattttgttgctcaacttgtgtttatgtccctttatttgtttttccattctggaacaccccttagatttttcctttagaattttctcctaattccaagtattttaacaatgattttttttcccacgtttgttgcagactcttttttctgtttttttcttacatttaattttcggttccttttatttttggtggacttcaattttcagtttatgtaatgtagcttttccatattcatatacacagcattcctgaatgaatttcctttatatactcccagaattttgtcgtgtaataaccaacttttagtgaattagattgcagactcctttcttttttttctttctttgtggtcctcctctttcattgggattctaagtgcatttttttgtctcttcatttgtagatactgttaaatatcaactctgttgctaaaacatgatactcactcaacctgggatcgtatgattttttatttttatttttgtaatttatctttctgttgttgtgcaaattggatggcattttgtttacagacaatgcaggatagtgtcaggaaggacattggtgaagttctcattggaagtcccaagtaagtttctgacaaagcatgtcttatctgggcttgctgcttccttgatatttatttctccagcaaatcaggtttgtactgtattccacaatccaagagtgttactacttactattgaaatttcagttaatcatgcaatttcaagatgtgatatgtccaatacccatcaggaggacctacttaacgttctcacagtattttttttcccaaatacatgatagcaaagttttaaattgtggtgacaattgtagtttcatcgcgatccttgatgttgcgggaaattgtagacaaatgcaactgatgtggctgcaaattgcaattgcgattgcgattcagttgcagtgactctgaaaaccttgatgctgtggccgaaatcgcgatcacaagttgtttgttaagactttgctgatggtagtgtatagagactttagctatagtggttcataatcttttttataactccataattacatggacattgcccaaagcaaaagccattgctattaaatattaattattttgcattatctgatgccattactttctgatgtggatcactttactcgcatagatattttgtatcactcttgaatttttcccatatttgagttcttacaaaggctggatattgttgattgataaaaaaatctagaaaatagatgtatattcttatgatgaatgagctgatctaatgtgtactcatttacttcattaacagactattgcagcagatctatctcgtgcaccaaataatatatgccaacttgccggtcccagtgagaatgcagttacttcaccatttgagaatgaaaaaggttcaaatctaatgatgatgagaggaatgacagcgaaggactttgaccctgtaagatattcaggaagatggtttgaagttgcttcacttaaacgtggatttgcgggacaaggccaagaagactgtcattgcactcaggtaaatgctaaaataaatatagcagtaaatatagaggacgtcatttggtttagaaaaagcccattatatttatgctctttcaacatctttccctaatcaacttcatattattcataataaattgttgaatttggaggcacagacagaaccctaaggttgttcattatttattatgcatgtgtggataattctgtcattcagtagtataacagttagtacatcttggagataagatttatcatttaccttatttggcttcgacaagcttcttgatactaatttgggcatactatgacatttcagggtgtatatacgtttgatagggaagcaccatccatccaagttgataccttttgtgttcatggaggccctaatggatttataactggaattaggggaagggttcaatgtctttcagaagatttggagaaaactgagacacagctagagaagcaggaaatgataaaagaaaaatgctatctccgctttcctacattgccattcattcccaaggaaccttatgatgtgattgctactgattatgacaatttttctcttgtttccggagctaaggataaaagttttattcaggtatttactgaactaaaaaatatagcttaagtttgtagttattgaacttcaaaaggctttttctgaattttcaacgatggcatatatgacatctaaagctaatttattattaagataaattaaagaaacaatactgcatcatacagttctttaattaatagctattaattaggatgtaagtgtatgatttgattttgcttgtagtgttaatttccctgtgatctatatcgcagatatactcaaggacacctaaccctggacctgaatttatagagaagtacaagtcttaccttgcaaactatggatatgatccaagcaaaattaaagatacacctcaggattgtgaagtaatgtccaatagtcagttggcagctatgatgtctatgtccggaatgcagcaggcacttacaaaccaatttcctgatctaggactcaactcccctattgcgcttaatcctttcacaagtgtgcttgacactttgaagaagcttcttgagctttattttaagcagtaactatgttttattttatacagatacaaaaaagttattaaatagataaaaaataataattttacaaaattaatcttaagattaatattacattaaaaaataaaaaaacacttgttagggatgatatttgtgaaaaaaaaaataattaatattatattgaaaagttaaatataacatttattttgagataatttttttttcttcaaataagacacgggacggagggattaacatttgactaaggttttaatctgtgttgcggaacaagttaactggggacggttttcactctcttgcgtacctgaatttttatgcaacacttagattgtttcactttaaaatttatatgaattcatattgccagttttcgtactaataacaccacttataacttttacgttaagtatcttacaagttgtacccattttggagtgcatatataaaactcattttatgaacatatacaatatacagaccaaaataaatcagcatttgtaactagaaatgttgttttccctctcggacttgcttaaaccacataatcggttatttgggaccggagaggagtaacgtaaaacaaacctacataatcattgttaatgtttactaaagcaatttcgagtaccccttggaattggttctttttaagttttaacattccctttttaatgtattcattgtccccccggaaagcgaatattgacgtgtatgattacaagtgtcaattaataataaaatcactaagactgtctacataaagtcgtctataattaagtcctaaaaaaagtcatctaaagttacaataatactatttgatacaaaatctttaacataaggagttaaaaaaatgctataaatgtctcacgatcaattgctttgtcagccatcggggtagaatacacgtctttaacataaggagttaaagaatgtatacggttgtagggtcatattgataacttgggtgtagatgttccaagccatattctttattgtgatagtaaatgtgcattgaatttggccaagaattttatctatcaatctatcattttaaaaaataatcaaaacatattgatattaggttgaaagtaactcaagatgatattaaagataagttgttctccatggaaagatagccattgctgaaaattaatggatatgttgtcaaggcctttgtctactgagacgttcaagtataatttggacttggtgaatgattgcaaatagcttgagaccctttgaagtcaaggtgaagaaatgttgatatgtattttgctaacggggacaattcaagttgtaacgcaatgtgtggagctcaaaatttgaaactatgagcctcatgagagggtaggagggcagagcctccacgatgtagaccaaactcatttttgtgtttttttttttttttttggaatatgaaccagtttattaggttatgagtcagggtaaaaatagaggtgttgttcacattttaagagttttatattgttctctatacaagaaatagaatctttctaactgcctctagacgttgattacattgactagatcatgtaattttttttctacatttttatttatcctcatcttctgccataatatgtttcaatgttgatttcctctacaatattgtgatcataagaagttttattttggttatatgcattatcattcatcactacgatgatgtaaatgaaggcattatgcttggcctatgacaagatttagaaagaggagaattctgttgcacaacactttgcaaagtcgagaggatttttttcttaaaaaaagttttattgattttattgcttttgatttaagatgtttcaattgagtaaaagaatatgattaggattttttcttgattcttttcacacttaataattattattgtacaattacattagtaattgaatgacttgaaccaaacaaaaataaatttgttcggattacttaaaatttaaaccgaacttgattaatcatcttggctttaactttcatattatccgatttgagaacccgatggcctcacctatttatagttgtttttatctcctcaacaaaaagataggtataattttgaaggaactagtatattcttaaaatgcacactatatggataaaatagtaaggtcctggtccttttcgtgaatgagacactccttagctttggttataacgattttgtttttccaccttatggaatgaaatctatggccaagaagtgaaatggactacccgtgagtgacaccaaagcaaaggtcgtgacaagggtccagtaggattggcagtttttgaagagtaagacacaagttcctcaaacttgctctctctttttggtagtaaagtagggtggcaataaatttatgcagataagtagaataaagggaagaaatggattccataacgaagataatatttaaatataccaaaggaagattcagctaacacaaatactatagttgcaaattaacaatttttttagattcggaatttaattcagagtgttttcataatcaaaagccataagactaatcttttaaaaaagtagagtactatttaaagagtaattcctttactcacgaatacttgttttttctcataatcaaaaattaaatgtctatcatgtatttaaaagattcaagctaatagtcacttgtctcacaccttgtggatgcaaattaagatacatgaatcctgcatcttggttttcctaatagcatggtttttggcttatttcaaaatagcaacttaactcattgatagatatagattcgtaaataatgttacatctttctcacactcctgcagaaccccatatgaaacaaaattacaaaatagatggagccaaccaaaataatccacaattcccttaacctgaaaagcactcaaataaatagttgctttcctgatttagttaacctactattccttgccaactaaaacaccaatttacttaaaaaagccaatggaagagatcgtcctacttttacctttcacatgaatcccatcagatccagagtttcaaataacgacctagctagtagcatgtacttaggaacatgatgaaacttaaaaaggtggcacagtagttaggactagagtgttataactgcaagcacatgaatgcagtgactatgtcatcaaccaatctcccatctatctacatagacctatgccatggatttcagtttcagatatagaacataaggtgaagcattcttgtgaaaccacatctcctgtaacaaaagaaatgcctcaaagtctctgcagtttcccctctagaacaaacccacaaaccacccttaaatcaaaagattttgctttctccccaacaccaaccaacaaaagcatgcataaatccactacccttgactcaaatgacacaaaagataaggataaatttcccccagtagaaataggaaccagaggcacagttgcatcactcataatgcaagaaattgagtacttcagcagaattggttccaattcacaaaggaacaagtcccaaatcacagaggtgagttcatccattagtacaagttctacaaccacaattgtatctacagtagaagaaagtacaaagaaaaagagaggaagtagcaagcttttaccaagtatgtgttctatggtggatgtatcagacagtggtaggccaaatgggacctcagccttcagttacaggaacctgaagtctggcacaaaaaaatttcaggtctagataatgctctcggatagcttcgaaaaaccgagcttcttaagacgacttgccaaaggtgtagcccaagccttttctgcattcccacattttatgtccacaatttcaacaatgttaggtatctttttatcatttttctccctcactggagttctgaccactgaacatttatcagaacctagcatgggtactctctgtgtatttctggcattagtttttgttttctggggcatgccattgccaggtcctctacggtttgtagttttactgcttccactgctaccggcttcaactgatgattttctttgttgtagtcttttttgggttgtactgccacagggaacagaaacaggaagtgtttgagttttacttcttgttgaagatacctgcttctttgatgcagaagagatgtgaaccaattcccttgtcattaaggaactgattgttccagtggtgcctagcttgatggatcctcctccaccttttataccttccagactctgagccatgctcctattagtaacacctccaattcaatatccaaatgttccagtctttgagatgaatgctcccagcagaattattcagtgatctgttacacttacaaattagtgtcaccctgtgatttgagatgtaaagtcataaatttctaacaaattatttggtttggtttatctttcatgtattaagactatgtttggataaatttctatacaaatacttatagaaaataaaatatgaaagtaaatgaattgaacttctttcatacaataaaatcattttatacactttaactttcctagaaattagcttctataaaagttaaagtgcaaaaattaattttaatttatgaaaaaagttcgatctattttacttttttatttctttttcctataagtacttaaagataaatttacccacacaaagcctagctatagaaataaagagatatgcgtcataattttcaagagaaagggggatggggtggagagttactagattcactaacaaaaacatagttccagcatcaaatcaacaacagcagaacaacaattctgaaataattcaaaaacattatagactgtgcatcacgatttcaaaacaaaacaggtatttatacagtgcaatgtactctctctttgtatgccatgagacaacaacaaccacacttgatacttcaggatgagaatgccaactcaactataataatttatcatggaaacaaggggagagaaaaagaactaacccacatagcaaaaattcactaccaaatcactatggttgggatgaagcagaatcaaatctaaaacactacccacattaatagaaccagagaaggataaaaggaatacagcttcaccaaaagacaagctaaatcaaacgcaagaatcatcaaatttgacaaactaaaataagcatacatacacaaacagaaaaccaatgatttcgtttgaacaaaaaggcattaacttcaaattcaatcaaattgcctcacttcaaagtgtggaaatctaattctaacaagtaacactgcagaagaaagaagcaacattttagatccacaaagagaggtaagatcaaataaaggaaaaacaaagttgggtatcgtacacatagcaagcttatggctccacacgtatgaaaattgcagatttgaaacagacccaacagaggtagggaacttttttgctaactttttgagctaaaattcagtgaaattgaaagttcggaggcaacgagtttgagaaactgcctctgttctagaaaaaaatcatcatatcatatctaatccaaccaactttgaggaacaggctctgtgtcttattttgtagcgtgcgcatccaatgctgtgttgatttgactcacaaacatcatcgtcgtggaaaagttaactttcccaccaaatattcactactcattatggagaaatcaaatcataatcatcaacatagaatactgggtggaaattccaaatggaatgccactctctagcactatctttcttttattacttgatttaatagacaaactgctaaaataatttgctacaataagttagtaatgtagatggatgaattaatgatgtcatattttttttttcttaacccttcactttttattgaaaaagggaaactggactaatataaaaattgtctgtaaaaattgaacttagttctatgattcaattttaatctgaacatattaataattcatttatgttcaattactcaattactgattacaattgtaataaaattgtatgtttgaaataagagaaagaaaattaaaaagtaaaataaattaagtttttttataagttaaaatcaaatcatgcaatttaatttttatataaaaagaatccatctaaaagttgtgatatatagattgattataatttataactttattaattaaactgttactaaaaaaataatccaaaacctaactttgagatcccaagagaaaagggcaaaaagtcagaaattggggctgatgagttcacagttgggcaaaacaagaatcacgtggtcacaaaccggccaaggcgacaggatccgacttattacttacctgccatcatcctaaagtacacgctccactctattgtagtactacaatgttattcacatgttcataattttagatttaataaaaatttataaattacgtgatagtaatttttaaattatcagaacattttataaaactattatttattaaaagaatattcaatggggtaacttattattcttctaatggtaacataaaacaaaataaacatttcaacacacttgtgtttttttctctcttcataattgaagattataataaaagtttatcacaaataataaataaataagagaatttaacataccacactatgactctcgagaataatttttaattatgataaaaatttatttattttattattattaatgttaattgctagttacatattttcccttattctttttcttaacgcggtctcttttttatattttttctaacacgtttttattattaattaaaattattggaaattataaattgtttgagtcttaccctttatttaataagttcactcaaaattttgtagttgtcgataaattctggccaataaaaaaaagaatgtgttagaatctagagagtgagttgctcctctttattttaagaaaattgatttctataataatattcattattttaatttactttacaactaaatcactaaaaggattttattactgtaataacaacttaataattacgtttttgttttgtttttcacatatatcctcttttagagacaatttgttcaatgtacaatttcatagtgcacctcttccaacaagaattcaaacattatttcatcatattgtgagggattagaagcttatgctaaacccaactttcgtcagtaattacatttaataatttgcaaaaaatcattggatgtcaataatgaaaaaaaatgaagaaagaaaaagaatagaaagaaagtattttgtgattaatttgtacataattaaggaagaaaattaaggttttggtgaatttgatgccaaaatttgattatttcgaatttagaaagaatgggagtgtgtaaatttgagttaaaagaaaaaaaatccttgaattataaaatattgctagttttgttttattttatttaagttgatgatttttttaggttattattattgtttaatttatcttgtaccttgactagtttttttttttgtattattggaagcatatttatgttattattttttattacggtttatttccgtttaaaggtatttatattattttataatatatctttgtttcttattttctactcaattaaattagagaagatgaacttattttcctttcttttcactttatattctaccaaataactaaaaaatcattttttctttctttctttccacttattaaaccaaacatggtacattttctattcaccacaccattcaaggtccaaaccctaccacatgccctatacaacaagcgcatggttccgaagtccgtacgtttggaaattgcggcttggaaacagacccaaaacaatactttgcactgaaattaaccgaaaacgaaacttctatttggatttttggataaaggaaatgtatgaagtgacaaagctttttatataaaaaatatattaactcttatattttatcataaataactaaagcatataaattatgtgagtttttttttttaaattatataatttcagtaattatgactttaaaaaacttttcatttatatataattatgcagttgaaatttacttttgaactctccacaaaattcctctcgcaataaatatacttaatacaatgtgtcataaggtcttcaagaacgtcatatccaaccagcattttgacacactttcctcgtctcattatggagtgcacgtccactgctttgatttgattcacatcattgtggtaggtgtgccaaaattagttttccccaccaaaaatattcataattcagtacgaagaaaataattttaatcatgaacataaaaatagtgggtggaaactggaatgcctttaactagcattaactttcttaattcaatggtatttattattaattttttttatttaaactcaagaaaaagtgaaagtttgtgaaaaataaaaatgaattatgtttaataatagaacccacttacgatatgtaaaatgtaaataaataaaaaatactggaatgggaagtgaaagtttactctttcacaaaaatagaggacaattacgtagtttgcactacatagattttatatatgatgatcaaatgacaaacttttcatcaaagaataataaggtaattagctcctgccaggcatgcataacggttaaagtaggtccatggtccattcttgtatgccatttttgcgctcgttcataagattcataaattcatttgtacagaatatcataaattcataattctgcttgatattactgaaagttgtcaaccttaattgtcactggctatactgatcatttgtgcatgcaaagtgctatttgagcgtccaattatcattgcatgatgtttctacaaagaagtatatgtttgcaacagatcaacagaaatgcagatagattctttttataataatttatatacaatattgatatagtttgcatcttcagaaaagtgagaaaacaacaaaccggtacatgatgcaaggcatgaaaaaccggtatacattcaaaatatagaagcaaaaaaaacaaaaaaaaaaaacaaacaaacaaaaaaaactgctaactagagaagtaaaacgccgaggccagtggttttggcctttttcttccttcaaagcaaaacgtgttatgctttggtatattatcaaaacataacactggaaaatttcctaggatgtcaaaaacctctatagaaatcaacctcagataatgatatttaaggcataccaattctgccttgaaaatagaggcaccagagtagcagtatcttttgattgcaattaccaaaggaaccatgcagccaaagatatctgaatgagaaaaaatctccaaacagttgtcatggcttttcatgctgtataagggactaccagtctaccactatttcccagagtaccagttttgagcacacttggcatcaacagagaggtcaactttaagaatgttcttgccgttgaagggtttggacatgcactcaacaactatggacttcgcaacctcagctgattctgttggtccttccaatatgacttcatcatgaacctgctttgacatatccaagaatcttagtgaaaaagtagcaagattggaatagatatctgaacacattcagatttgaaataacctcaatatcagaacatactgattaaaaataatggttgatagaaattgtaactatatggttactaatatcgtttaattgcttttagattaaggaaattgcctcaaaaagttggcaaaacgaactacttcttgtggtggaataattcaccaatggaacaagttgtaatgtaactgcaattacattggttgataacaagaactacaaccaagataatgtcattaataatcaacaggaaaagaagaagaaaaaaaggatggactacataggcatcacttaatttctccaatgatccatagaaaatgttttgagaagacagatgcataaattattgattacatagaaagcttatagaatatgagtcagccaagctcttgtttgcgtattaatgcttatattcctccaatccccctcccaacttagggaggaagaatggatagaattgcttgttgattcaagactctagaataatggcaagtgagataaggtgtaatttgcagacacactacaataaaagcgagaaagaattatttttttaacaaaaaaaggaaatttagggggcactaaattacctgaagaagtaacttccacccaagctccttcaaccgtttattcttggaaatttgcaacatagcacacatggcaacatcagctgcactaccctgttgaattctacaaatcagaaatccaaaaagaaaggtatgcatgtgggaatgggttacatggtaatagcatctccacagaaagcattgggctattatgagtcagactaaatcttcaacatttcagacagcaggatagggatttaatgacaaagtaatgtatttattttaggaaatcatgtaacctgaagccattatccaatggttaagattagctcataccattaccactccacaagggcctatttacaaattcacaatctccccattcacaggtagcatgatgcatgaacagcaatgaatagtttctactaaatgtaatttttgtcaatctaacaattgaatcataattagttataaataatgatggtgtaaaagctaattttagataaattagacattatcagtatatttaatcaaatagtaaataatttcttatattttcagtaataatatatttatatttatctttacatttacaaactaatggaatatatttacaaattctatgggcattgtaataaaccaatcccaaaagctataagttgttaggtaaagacacattttttggactatataaatgtactcatctttacttactatcaatgaatgaaatctgaattttatgattcttctttatagcttttatttgtaggtttaatggtgttttcttaggagtagtggtagagtagaattagcactctatccaatggtgctttcatcatcttactccccctcccaaatccaccacaaccaccatggaagacaacctttaaggtattttccgaaattagatgccttccagaaccaactcaaccactatgaagaaaataaaatatctcagcacactacccatctaaggtcccaggattcctttcatgacactttcacctccaccgtgcatagcatgatgaagcaactctctgctctcgatcttcaacatcagacaccacaaccactgccgcaatcgccgccactgtcgccgccgtcgcaaccaccgccgcaacagtcgccactgtttccaccacaacaaagtttctcctctccgtacccttgctttaacaatatttcccatacaaccgttccactcatgaacattttccccaaccccaaccccaaccgcatctctgtatcaccttacccacttgctgggtgttgcaacaaaatctattttccccacatcaaccttttcaatttttgcaaccccaacccaccacccacaatccccttcaccgttcactccaaatccacaatcacaatacaccaccaaaaggcaaccaatgttttgcgcttgggaaatttcccagccgcaccgatataacccgtccaatctcattgcaattgaacctaacctccttccccaatcacacccgtccatcatattagaaaataaaacatctagatcaccatgtgtcctttcacccatgtgcactcccacatcacagctggctcccactctctcaattgcatcaccatcccttagatctccaacgatccaattaccacacatctaagccgttaaaatcccaccccaaccatgccatgtacatcctccctaaaccatctccacttaccaaattttttcaaaatcctaacaaccatcaacaccatccacgtgtctcccttatcccacatagtgcactttctcataaagttatatttcccttccaaccactggatcaaaacaagtctcataagccttttcttttttcatgtactgccaccaatttccaaaacccatccacaattattttcttgcccccaaaagcaacatactcatcatttgcaacaagctgttgctctcaattccagttgttttcaaaccttgaggacaaggttgaatgtgaaccggtgggtaatgataggatgggctctaggcccaaaattaaatggtccaaggattatataggatggagttaaatatgtattttataattatagttttttttttaaatttgtgttagaataatatgatgttgacacttggataattattatccttgattgacatttttaggactacataaatgtactcatctttacttattattatcaatgaatgaaatctgaattttatgtttatcttctttatagcttttatttgtagctttaatggtgttttcttaggagtagtggtagagtagaattagcactctatcaaatatatgtaaaggaaatataatttcacccaataatggatttcaaaaaaggagattcctgatagggaacagtactaactagactaatacaagatgacactattgtaatgttaatacaatcaaactctattcttattcacagctctatctggactatcatttcaatataaactatggaatatgatattttacaagtgggctctcaaaatgtgatctcatcattcattgttcttaaaagggaaaagttccaaactagacaagaatcacaagataaataattcagtacattttttatttactagagtgtgcaaagacagttagatagatgagtgagggagacacagtattgatttgtttattagaaagagctaaggacctgcactggagtattaatagcagctcgctcaatgtgacctttctgataggtgttagcttgggccatcaaagggaaccgtcgagctctccctagcaatgtgtaaacacaatgtaacacgcgagcttcctttttacgctcctcttgccattgcaaaacctcttttctatcattgtaccaaaggtcaactgttttcttagcttctttcacagaaacctgagagtgaacaatcaaataataaatcaagggcacttttcacctttgtaaatccctcataataagtaaaagttcagggtaccttccaatccttggaaagccccacaggagtcttcccatatgcaattgagaagttaagcattttagcttttcttctttcagaagcaaaggcatcctgacatggaaggaaaacaaaaatcaaaacatgatcaatcatgaattagatggttataagttataacagtaaaatgctaaaacaacttttttatatcttgagggaagggcatcaaataacgttaaactactaaaaaagcttattaatgcctggtgtattctgatttacttctattaatatacataaacatcattaaacacattatatatcaaaaaactcagtgaattcttctactaccactgcaactatgttttccccctaaacagtgttctaatgatcagtagctgtcctttatttctattggaaagttcacaagttatttgtatttgttctgatttttaataaattatatttattctattttccgttgatggatctcggtccaatcagaataaggattagtcctccctcatgcatctgccagcactctggtggtcactatatttgacgtcatcagctacaagaaataccaaactaaagacaaagccactacttccacatctcaatgaaatggtacttctatcagcggacagttaccttcaaaagaggaactgggggtttatcttcaccaggctgaggatgccactcaagaagcacttcctttttctcaactgctttacgaatatgtgggtacatattcattgcagtccttgaatggaaatctccaccagcttcaaaagcttccaacatgctcttacagtctgcaaggtgtgccagaatcctaagttccagctgtaacaataaacaaggcagttaacagaatgaaatttcttgaaaatagttcagttagatagacaatatagactgttaacctgtccataatcagcaactataagagaattcctgggtgcagcaatgaatgcttgacggattttgtatcggtccttttccagagcaggttgattctaattcatgaagtgtatgtgttaggttctatattgttttgaaattctgattaatctagtagatgtaatacccacatgtcaatgtcaaaatacaaattgaaaatgaatgagatgcattgtgcagtccaaatttaggatccaaatcattgtaataaagtaacagaaaaggcatcaagaccaagtagacatcaaatgattacataaatgtgtattgcaattagcaaggctgtgattagtccaaaaacactaattttaataagatatttttaactgaagtaataaatgaatacaaaagaatgtaatttgagcagagatgtcaagaactgactcttgacctcaagatatttgatagatgacggcctaaaaagggttttatatttttaacacgctacctcacacaagaataattcaggtttgaaacacatataatccacagacctatttcaccttctgctgaattttatttttttgttcaaccttactgccaaaatttagttaagaaaaacagcagcaaaaagatagagtggaggtccaaaatggacttatatgtctaataggaagaaaccctactaaaaggagaaactacattttaggttaaaagacaaaatgataaagccatctactaagagtttagcatcaaggaaactgtatgacaccaattagtgaacatacaagcacacagatgaaggttaatggtcagatctcaaatgtatagcacttaaaaaaatttgaagttcacaacaactactattaaaatgaaaattcctaatcaaaaccattagagaattctgattaatctaattagaataacctgcagatttggccttcttgctgacaagcgtcctgtctctgtgttgatatttaaggaacaatgaacacgaagatcgtttcctgatatattatgtccctgacaaagagaaactgcagctattatagagcacatataaagagcttcagtgtaagaatacaaatatttactaaaagttctaaaatgtaagtggtagcacaataagcattcaaaaaattagcttaaactcagataaggaaatgatttccctagccatagctaagcagtgggagaacttagtattgaccatctccaatgagtattttaaaagctcaaggtactgtggtacttgtgagtttggtgcacaggtgagttgtcaagcatctcattgactgatgtttatataataattataattgtctaaaaatatcctttctagggaaaaaatagaaaaatatcatcaatttattagggacaatatgaacagtatggaagtttgtatactagtttcaaaataaaagaaattccaagcaagctcaagaaagttcatattgcaaaccaaacaataaaaaaatacctgcaggggaaggatgaagttggagatcaaagagttgattgaacagacttgacataaagcagcaattgcatggcaagcttctctcccttctttctctgttggaaaagctgcataggctgtcccatatgcagatttatcaatttttaccggtgcaacttgactttgagaaggattttcatcttcatcatcaagatccaagttacaatcctcatcaaaaaagtcataatcagcggaaatacttccagccagagcctttaaagcatcaccactaactgacggccaaccagttgctgtgtacatctcagtctccaggttataacctaggctcgtcaactttatatcacgaaatttttttggagccttcttaccttcttcaatcacattatcaacattgggaattttgaatatccgttcagttggaagcgtctgattggagtcctttctgtaatgaagcatgtgacaagtgaaatgaaaattttacttccatctatatccttcagctactttgttgtaaacagaaaagttcataaatatcaaggtaggtaccagtagtagtaccatcattcatgaatagtgaatacattaaacttatgaatatcataaatatttcaggctttgactagcaaatcattaatttaagattgaaataaatgctacacgtaagattttaaaaatgtgcacctgttcacaatgccaccaaaaagaagctggcgcaactgcgaatcacttcccacattcatatactgggcatcaggacaatacctagtggcccatttgcggaatctattaacagctacctcttgctctgctttggccaccttttctatgcattcaagataagcccggtcaactagcattccctcagattccatcatgactagaagctcaccaaatggacgccaatattcattgtagaaatcatacatggttttcccataaactggcacaccatcaaatttccagggcatgtctgaaagatggctctttaggctctcatacagcttcaaagtgctgctagcatctaaggcagaataacatatccaaggtatacgctcatctctctgtagctcttcaacaggagcaatgatacttgttttaccctcagatccatcctttttcaattttttcttactaaatatagttttcattgacaccttaccaatcaagtccttttcatggttcagctgagccctagacatgacccttctgtcacctgtaagtccttcaagagaataacccccatccaaatgtcttgaagaatcccataatcgtgccatgtgcattgtatcagcatgaaatcccgaaactttgaatccataattctctataacatgacagtcaaagctataattatgccagacctacagaatgcaccagtgactcggttatttcaaatatggtttgtaatctctggtcacgagcatagacaaacccaggaatttaatgccaatatgattttataaaagatagatttaattttctattactacaagataagaatatctaacaactacacaaataaaataaaatagaataacaaatcatgctagttcacttctatcataagatgaaaacttctctgttctatacaataaaaccatgcaccaactatcctaaatcaggtacacattaacttaacattaggaatgcaagttgcaacctattcttagcatattattgaaaaattgaatataccacagaacacacagtaaaaatcgatatggctctctgtataatatgacactaaacttttagattacctgaggttaatttcagaacagattgtagctgattgtcatttatcttaactaggaaggcatatttcataaagtagcaagcatagaactaatatttgagaagtgttgcatgttgaggagagtaataggattaagaacatagaatggatagaagaagaaaagttcaccttcttgatggaagaatcgctaaaaaattcagcaaatttttctaaaatctctttgcctccaccatcaagaacatctacccagatacaggactttccacctccaaaatcagcttctggaccacaataaatgctgaagcatgttatctccccatgatctacaggagtttcttgtttgacatctatcttggctacctttgaagacaataaaatcagcagataatgtgttacacaaataaaaattagttgaattcatgtccaaagtacacaaacagacacacgtgcacagaagcaacaaaggagataatcttgtgatatggagtaaccataatacaagtaaatacagtaaaaagaattatacctcggtatcacatgcataaataagatgctggaactttgttgtaagcatcttagcaacttcctctgcaagaggaatattatcaacaaccagaatatcatcatatatactacaaagcctatccaggagctttgattggtcagtaccacatgcctgtttagtaagtgttacattagttgaatcctttgcagttccatccaaaccatgatcaccattgactacagggactttttctttaccaatccccaatgaagatccgttatactggtgaatcaccctttcagaatccattaacacctttgaattgtttaatacagaatagttaacagaagatgggacatgtgcaccagaatcctgcagtacaatattgctatccccgttcttaggaacagcctggttctgatcaatggaagcaactccattagatgcactaaaactgccattttcactctcaaatttatttgagccgttcatttcctttttattttcagttaacttatcttttgctatagtccagcctctataatcaccaccagacaatttttttcctgaagtggtttcggaaaattcattgttgcaagaagccatgcccatcgtcctaacttgggcttcacatgaatgcaaagagttcagctcttcctcctcagtcatttcctccaacgtgctagttgatgcatttgaagttttcatagatgaaatgcaaactggactcttgcacagaaaattacacttacacctcacgccattgtatttatttaaccccgcagatatcccctttagacagcatgagaaatctgctctacatagtacataatttctaagcacagcgctatttcggagggaaatttggaatgactgcatttttcttctgcaattcacatcatgcaacaaaaataaaggttccaatcaatgaaatgtagccatccacaagctaagaaaaagcttcatctgtaggcatgtgtggtacaaagagaaaatatatctcttcatcactctattcccacatttactaacaaaagttaatccccggatagaatccttaatattaacctatttcaggttttatcatcaacaaattgtcacagcagttacaatacaagtaaaatttgaaaagtcacacttgacttaatgttaataccagtcacaacctttcaaaccagtgaagaacaacaaggcacactgacccattgaagtaaagacaaaaaaacaacaatcagcatattttactgtgtaacataaaaacgttaatttcttaagctaaaagcagaatacccagttggaaaagatgcaaaatttaaggatattaaagagatgggcgaggtcagaagcaacaaaagacatgaaatttgaagtgaaaaaaagataaaggaaaaagggtaaaccgctgcagaggctgagaaggtaaaagggaaggaagagagaagggacttgagaagcagcggcggcataaagggcagtgtggccttaaagcagagacctccattgaggcagaaatcacctccgagtgctcctgctccctccacagttaaacagattaggagccagctacttgaatatataatatataaaaatatacatacatacatatatatatatatatatatatatatatatataaaaggagacaaaatatttgaaaaaccttggccattaatataaaatacgtataaaataaaaccccaaataaaaataaggtgttataatatttaattgccacgtaatcttatgattggaaggctaggatgccctctcggtcggcggaggcataaataggagtcttaggtgctgtttggtgtgcttttaacataaaattatgaataaatactcatttttattttgaaatttatatgatattgataaattcatttctaatatatcaaaattttaataaaatttctcgaaagttaaaaaatgcatcaatccattaatttcatttattatcgttaatgaaagagtctagatgatatattcatggacgaatttgttgcgctttacacactaaaaaacgaaattgtcaacactttaaatatttagagatgaatttatcagtattttacctaaaatataatttaatttttattttttttattcattacaaacataaaattataataaatatgtaatcacatactaataaatccctaaaaatagtgaaaaaaatggaacaatgtcattttgttatcaaataaccttcttttatttttaatgcttaattgcataatttacaaacctaactgttattattttgtaaattttatcgcctattttttttaatcattttatcatcttatcttcaattttcacgtattttactattcatgtttttttccacattttatcattatatttttaacaaaatgacgtcattttccacaaaaaagtaataaaaaagttataatttttttgggacagatcaacactttattcactgaattggtaaaatgtacaaaaaaattttaaaaaatacgataatgaagcgtgcaaataaaaattggatggttaaagtcttgaagtgctgttaaaaaaaaaggcttgaagttaaaacaaaaattggaggtcctttttataaatttataaatacatctgaagaaataatataaagattataagatactatataacataatttgagaaaaatattgaattatgtaacctacttgtgtaatctatattatttattttcaatgttgttttgtttatgcaatgtttatttttgcaatttttaataaaatttaattgaaagaattgattatgtttttcaataaattatttcattaaaagacaagttaaaataaattgctaaattttcaaaatatttttcattgtctcaatgttaagaattttgacataaaaatagataaaatatacgaatgtaggaaaacttataaaactcatttaatacttttttgtttaattgtacattttattactttattgtaacaattatttttcacttagggtgcttttaatggatacaacataagaacaacacaagtcaagttactagataatttttttatcttatatattatttgatggaaataaataaaacaaactaaataatataaaatttactgaaattttctttttaatattaaattatctaagtaatctattatgagagcatcatagagccctaggccatcttcattcaacccttcattacactgtatcctgaaatgggtgaattttcagacattacaagtgtttatgtgccgttgagagaggcaatttaaaggatgagaacgtagattttcttttttttgaaagtgggaccaaagagagcaatgtaatttattatggttaatttgaagacatttcttcagcgacttttccatgtgtacaagatgaattgcttccttattagcaaatatatatctttattttgtgaagatagactaaagtttatgttaagtgcaagtttatttctgccactaatgatggatgataatgttctttctgtcaaaccaaaaggaggtttccactttgaactggaaaccatttttcattatcatctgaaagaccagaacactcttcatgaaaccattttactctagataagccagtttaaggaggaaaggaattgcattgacctcactgctttggttttatgatcaacaacacaagatatatggagtcaaatgttttgtcgagtggtattttccattatgaaagctgaaacaaaaaggaaacgttgtaacagtattgattagagaatctcgaagagtaggcaattatgaatctggtaacaatcttgtcattctattatcaatatctattatctaatactactactcaataaatcttgaacatgcaaaaatatgtaaccgttttgatcgattttcataaggataccaagtggcatcattaagaaattttatagaatgattctcaaacttcattagcagctgctttttcattcattgtccttttctgtaatcctctactgttttcaggttcgttttgtcaactacattccccatgctcgaaaaaagtctcttttgaacgttgttgtcttcccacttgtatatgcctctttgctaaaacatcaagagctgtaactacgtcactaatcaaaggtcgggtatctgcttcctcctgaatacacattgctgcaactgctattgcttggtgtagaccctttgttgggtagttccctttcagcaatggatcagccattgatgaaaatttccttcggtctttgaatagtggttgtgcctgaaaacaagaaacattatgaatgtcaattgctgaacatttgtgcatattaatggtctaagcttaaatttttggactagttttcatattgattagagggtaaaaagtgttttaggtccctcaattttcagtcaaagttaatctttgtatctatattttaaaaaccatgattttattttttatagtcatctctcttaatgtaacatatgatactagggtcagagacgaaattcaccaattacaaaaaatacgatgaccaaaattattatttttaaaatatggggactaaaaccaattttgaccaaaaatgaagggacttgtgatacattttgcccttgattagattataaatcctgaaattttaggccagagaaatatgattctaggcacataataaaagcttcatgacatacccaagtgaccaagttttgctcttcagatggtcttgactgatcaattgctcttcttcctgtgatcatctctagaaacactactccaaagctatatatatctgattttgtagtcaattgacctgttgaggcatactcaggtgcacagtagccataagttcccatcaccctggtggatacatgagttttatcaccagttggaccaagctttgcaagtccaaaatcagagagctttgggttgaagttttcatctaatagtatgtttgatgctttgaaatcacggtatatcacaggcggatttgctacttcatgtaaatattcaagtcctttagctgcacctgctgcaatgttcattctagtacgccaatccaaaggctttctgttcggaggtagttctgacaatcatttttcttttcttgttggtcagataacatttaacatgcttatcacaaaaaaaaaaatactagggtaatgttttgaaaaggggaacttccacggtgccagtcttgcagatatacttggtttctcacacaaatggaaagataaaacataatctacttaaaaccatcaatatgcaagttgttttatgttgtaactaataagtaataagtaataaccatgatgatccaatgtgctcatctggtcacactgccactacagactacacttagtttattgcatttattgaagtttgatactcaaagtggatgttactctcatttttatccgtgatgtattgcattagaagacataagaagcatttacttaccaagaaggtgatcttctaaagagccattcaccatgtactcgtataccaaaatcctttgatcaccatctgcgcaataccctaccaaattgacaaggttaggatggtgcaacagactcaaaatcaaaacctctacaagaaattccctgtttccttggaatccattcctattaagtttcttcacagcaacaacctgcatgaaaggaacacagcatttagaagttttttcttagcatgatattagcataatattcacatagatgcgagttgaagttatacctgatttaggcttttgaggcgtcctttgtacacccttccaaagcctccttcaccaatcatattgtcagggtgaaagttccgagttgcaacacataactcgtgataagaaaaagtctgagaggtaatattccctttcccaatttttgctatttcttcttctatgtacttccgtttgctggtatctacaagataaatttgttcaagttttaagcatcggtattcatcattgagaaaaaaatgtctgagaaagctgaaatccactatatagggcactataagaccactttgcacctttagcttagcaatatattgtaaaaagtcaaaactccagaggttaacaattgagacacaactattgaggttgagagtaagagatccttaggtttatgataccctaattggtaaggataagactcatagctcacaaggatgtgagtttgaatcctgttgtcaaatgataagacctcattggtacataatctgtaagaacttggtggcacaaattgtttcaaaacatgttatcaacaagctaagaacatcattaaactaggaagggagcctaaagagatgcacaagatatgcatgtacttctgcatttcacatcgttgaggcttcataataatcaaaaagttgatgaagcctattgtgatggcataaacctttcatggatttcaattttaggatttcatgttgagataaataagattgtgctagaggaaaataatttgtcgtggaaacaacattaaactgtagatatgagacattaaattgaaaaaatgctggcccgaaaatcgatacaatgagaaaattagcattggagctaggaaaaataccagatttaaaacacatgttggctaaccatggcagagcttttgcgtgatggtagttcttactgctccttttcaatgagttattgtcgatcttctcttgtgacgtgcaacatgaaaagaaactcatcttccactcctaaataattgatctaaccaaacccacatttacagaattgcaaattcatgcatctgtttttcaaatctgtctcttagcatgcaaatgttagccaatgatccaatgcatgcagtcttagaccctccagaagtggcttcaaatcaatttaggaagtttttcattgaaacattggccctgcagaaaccaaattgatcctgagttctagcttcacacaaactttcccatatggcatggttacttttccttcattgttattcaaaggccatagttaggaaaagaaatgaatgtcaaatatgctaatccaaaaatgaccgttagggagtcactcatctttaatatcattatctaaagttcctcaatataggatttcattaagtgttctctcttaggttgcactttattatgccaaccaaaatggagaggatcactccttaatgaaactagtcaagaataaattatgacaactattttatatggacagcttatatctactttgtatccttcctatctacctcagttatattctgtttgattaagcatgtacctaattttgtgtatgatctatacaatacttctttaaactttttgaatgacaataaactcatttaaatgatatgatgagacatcaattttaaaaaaaaaaaaaatggtttttacttaaatgttcattaatataccaatctctttaatagtacttaggtggaatattatatgtagtatattacattttaaattataattttacccatctacatatctgtattcctaacttatacaaaatatatggatttttttttcactttgattaaatgaatattttcttgtattcttgttcaataaaataaaatatttgtaatatttttatccatacaaatcgaagagaaatacttagaatttataacaacaacttatatattttattcaatcaatagagttagaatcatcattttaatcttacaagtattagtatgctattatgttaatccttcaaatattatgaatctaaaatgtcactgaattcttctgtataaagtggtgacataaaattagttatttttattttttaatatatttaacttaccaaatttttggggaaaataatatagcaatactctaatttttgaaggagaaaattaagtgtttagtttttttataaaaaaaaaaaaaaaaggaaagaaaagactctctctgtacacgttccaaagacaaggaacactaataaaaagccaattttgcaaggaaaattaatagttcagtcaaagttgatgttataacaaaaatcacagattccagagaatatattctttttgaaacttgcagtccaaattcaaaaattatttggaaaaaaaatatgatatactattaaacatgtgatatgccgaaatttaaagttatatttttgttgagcacgtcatttttggactaatatattgttaatttttcatgaaaactggcagggagcggggggactgagattccaaaaaatacagcaattgtgattctaattcctgttagatgaggtatttacatttatactctgttcggatttggacatataaaaaaaaatgagaaaagagaaaaaggataaagaacaataagattgaaaatttgaaatattatattactcggatggataaggagaaaaataaagatgaaatcgtgtatttctggggggggggatgttttctgccatatgtatcattgttagaataatagtaggattaacttttttaatttttatgtcaatttatttgtcactggctgctataatatgggaactaagaaaaaaaggatttaatttctctaaaataagatttctctaaagtgaagaaatgcaatttagataatgaaataaatacattcacaattatttattagaaacatcttaactaataagaacttttcaattgtaatatcttgttacaagttttttaagaccaaaatgctgaatttctaagtttataagtattttaaaaagaaaataaataagattttttaaaaagaaattgaagtatacaagttaattttaattttgataaaaaaaaaattaattcattttacctcattggtttattttatttcgtcttttacaagtatcaattcaaaatttcattcaaaaaataaattaaattaaagataatatttgctgattttgcgttccgtcatacgactctttttaccaacaagggttgcaatgatttcttccccattattgtaaccaaaaagcttcatctttgatttgaactgaagaaatcaaaagcaataaaacatagctagctccaattaaaggatctaaaatcgacaataatcagaagataggttcagcaatctgttcttagattagtgaaagcttgccctaattaaagtttctaggtatctagatcacctactgaaacaaaaactgtaaatgctacacgatcaggacattaaacatggggaaaaaattgaattaaattgcacaaagccatcgtgataaattttcaggtctttcattaacatggcaactttttttaggaactcttcacctgcctcaaactgtattgaataatgtatttatttacaattaaattcaatggtatccgttagcaataagtgcaaagggaacttaaaaaaaaaaaaacaataagtgcaaaaggggaccatatagtggtaaacaaaaaccaagcaaaaagggaaaatgtgtcttaaagataggcctcgacttaataaccttcatctatatatgaacatcaacttctgtcctaaaatatggcactatgtggagcctaaatgtggtacaattggtggactgtggacatatatataagactaaaacataaaatgattttaggaatatgaactggaacgacaatacttctgaaaagtgcaatgctaagtaaatttaaagttattataagccttcaaaagtaacatctaataatgacacaaggaatccaattataaccccaactaaaaggatttcaatttgctatgactgtgagacgactatactcacatggaattagaagaaatggctccaattagtcatgtataccttctaaatctctgccagggcattcagctagggacttgacttctcttagatttaattgttttacaatgaggttcagacattattagctaggttttaataagattggcacttggattttccttctgataaactctaatctttttatcttacattggatataatgctcacttgtatattaattttaccgaataaaatctaaattgtagattacagatgactacttttgttatggtaaactgattttcagtagcatctgtatcatacaaggctatgcaggccaatatcaagtgatttagatagctacatacctaagtagtaagtaaaagggaaagagaaaaaaaaaaagtactaatttaactattaaatgtgcctaatttcttcagttgaatctgcataaaacaccaaagttcaataaactttctgccaagaaaacactaactcctttgtatcatataattcaatgcatgtgcctagggataatatatatccatttatttaagtataaaacaataaaataaaatgtacacaacataatactaatccaatcaaatattcaataacacaattttaacaaaacgtattacaagaactaagctttttctctaatagccaataggttttatagtgaatcatttctaatggttcgatcgtacaagcagatagcacaaacaatataaccataaattaaacaatttggtagggtgtgccaggcctatactgtattgcaagaaataggcgacacttgaatacttaaaccgataagaacagatactacactgtcaaaaggccgagaaaggcatgctttggttagtatattgttgttgcttttatttctgttacatgttctgctgctttcttgactaactgatgtgggactctttggcgaatacgctgctgttgcaaacttgcaatagtgaccatttgaaatgttagttcttctaatccggtctttcttctaaatgtgttttcttatttaggatgtgacagtgcgtacaaagtccaaacctagtttgctatgtgttgaatgtattaagaccttcatggaactactgcatgcactaaaggatgctatctgagaagttaaaagggataggatgactaatttagagacaactcattatattatggattctgttgctgggccatatccataccctgtgatggtaagagagtttcatgcagtgattgacaagtaaaccagaaagcaagctttggaaaaatgcataagaaaccaaatgtgttgattgcatgtgttggtgacaaaaaaagttaggtaaggtgtgcggatttagcttggataattgcaagtatgcagcaatattaatttcagatatgtgatatataccaaaggatgctgcctcagaagttataatggatagggtgactaatgtagagacaactaattatattatgtttctgttgccgagtcatatgtatagtaccctgtgatggtaagagagttccatgcagtaattgacaattgacaaggaaaccagaaagcaagctagctttggaaaaatggatagatgaaccagatatgttgaatgtgcaatttttttctctctagaaaacagcttggtgtcgaacctgaacatggctttttgaaagatttagggcgcactgaatatcaaagaatcactggggaagcgttgaagagggtactatcttgtgtgaattgtttattaaaaaaaccaagtactatatttgaacatgtttaaaaagtaaaagtgcatacatattggcgaggactgagtattatatttcaaactccttatttaaaagataagtgaaaagaaatatttccaacaaaggggtgaacataataaagagaaaatttaaaaataagcattgaaataaatgtgatctgttaaccaaatgaaagaaaaaccaaaatgccatcattctgacacaagccaaaccatatagaggaggctaccagctgagcaacccagcaaaatagagagagcagttgatactctaatgtagtcttccactacaattgcaaattcttttaataactttcttgacaccaacatagtatcacatagttggtatataattttgtttcataagtacgtgcacgtggttaagaatttgaattcgatcttttatccataatttatatgtatttaaaaatatatgttaaagaggtcaacttattaaatagatctcagtatatcaagaaaataatcattattttttttggtatttatactgttcacgaatattcatttttaatttgtttttttataatttaactcataataatttttgcattcaatccacaaatgcttattacaacaaaacaaatagatagaatttaatttttgaaatgaattgaaaaattcaacctgtatttcaagattttgtttcattttaaggaatataaaaaaaaaatacatcatgtttttatcattattatgatatttcatattccaattcaattggatgctagaaaaaaatgaatttgggatagtaaagaaaagaaatattttaactacttttttataataaaaaaataaactttcttgacgaagtttatgaaaataagttttatggtaaaatttagacaaaatctcttacataataaaaaataataagcaattaataaattaaattgtttatccaaatatactaattgcttgtgtaggtggcttttctaacataaacaaggctcgaaggccatacgctaaaggttggaatattggtctcttcaaaattttaaaaaacaaacaaagattgcacaattcacttttacattgaaatttaaagagaaatgttatttttagtatgacatcatttttatttttgcttaacagcattttatttctttattataattaatatgtatttttttacaaacaattttttacttgaatttagtttttttaattaatacatttagatcttcggtcactttttcgttacataaagttttcaagtccttgtttttatgcaaaacgttttaattttggataaataagtttataagatattaaaataaattatagacaaattgaaatgtcttattagacccactctgaatattttttatttcataaaaataagaattaaacaaaaattgttctaaatataataagtacatttcttttcttttttttccttaacaaatgtcataataagagcaataatttgcatttggaaaatgtaattaataaaaaaaatattattaaaatttaattggtaaaagaatatgcaatttttttgaaatgtaaagaaaacttatattttaattatgaaatatgaaaaaggtaaaagaaaaggggatgaagttaattgataagatatgtattgtgaataaatgttattcgtttgaaattaataggaagaatgtatttgtttgatttgaaataaataagagtatatctgcaaattaaaaaaagtataggaagcttttctcttttatatcagagcctggtttcgatccagggacctgtgggttatgggcccaccacgcttccgctgcgccactctgattttagaaattattagtatatattttattacttctataatatattgtgcagagtactgtattctttgtttgattgaagtttttgtgcaacgtcacagagcaatctgctacggtcaccaattcaccaaaacaattgcaactttgacgcccacgatttgttttgtttgaaatttattggatggcgtggttttccaaactttttagattttccgtctacttgccaaacttgtcacgacattgttgctaagtaaatatgttccttgcacgattagccaacagtgggagcagaattcgataaacagatagataaaaataacattattataagatatattaatggtataaagggaatataccaaacctgaagcttccaataaatccctaatattctatttatagttaaaaaaattaggataaataatcattttttatatgtacagagtacttacaaatttatctccaaaaaataaaatttcaaattttattttttgaaaatgaaagaagtacaacaaattcatcaatctgttaactttcattcattattggcgaaaaagtttgtgtcatataagaacgaaaatgtcataaaaatgattgtcaatatatagatttgactaaaatgttagtaaatttttattggaccaaaatgtcattaaatttttattggactaatttatcatatactaaattttgtttcatttaaggataaaatataatttaattttcatcttttctcttttttttttattgttgcaagtataataatacaataaatactttaaaaaaaggaaaacaaacataagttaaaacaaacataataataaacataatttatttgttgatttgaaatttctaatctgagaataccttatcccaaatatgagactcaaataaaaacacatgtgtcacattttttttcactttggaggataaaatttaaatttgtatcttttaagaatgaatttgtttatgttttacatattgagacaaaaatgagtatttaactaaaaaaaattatgttaaacaagtagttgtgttgagcattatttgtaatttatggaaatctatctagttgtagtttaaatataaaaaatgtataaaaataataattttattatttgcacactgataaaaaaataattattgttatgaatatattgagattaagctactattttatcttacaaacattataaatttactaggatcgatgacttaattttggcatttatgttatatttggttgagatattaaaaataataatgtaggtcctatatgagtttcataattcttagtctctatcttaatttaaagtatattttttatctttatcgtgtcaatcgaatatttaatctatttgaaaatataaatgaaacaaaataagtatgaaccccttttaaaaattccaacacgactagtaagaaagaaacacacatgttggccagatattactaactcgaataaaatatatttcaccattattttcatagaaaaacaaacatatgagatcgaaagctaaccatgtggtaatgcgacatttatatacggtatatatgatgcctgttgagagatcaaacaattggttaattacgacagccattgattacatcgaccttttttttaattaaacaactctgctgtgtaattagcatcatttttatagtttaaacacgtgttggataagtatcatcacacattatattatttcaaccatcttttttgtagtaacatgatcttttggggttgtagtattacattatttgaacacatggacacctttcaattcaccaatcaccacctcacctatgattatcacagtcgtttttctcatctcatccgaaccaacaaaatatctgtcttttttatttttaatataacttatttttttcatacgtctgcaactgcaagacttgatatttaacctcaaaattttaatatcttcgtatgtttacataattttaatttttattttaatagtatacaaatttgagtaaatatacactatttgcttaaagaatttttatataattaatcaatcataagttattatacaatattaatttttttttaatgcatgtactataaatttgttgattttaacaataattactttaaaatatacttattacatttctaatcaattaacactgtaaacctttttatactcacactgtacaaaaattgaacagaaaatttctatattattaattaattaaaaatattataaatatgagttttacagtaattataatattcaataaagttattatacacgtacgttaatttatatataaacggtagtataagaacttttatattattaatatattttaattaaatattaatattataacttataatattgaatgactgatccattttcttttcaggtgtcctcaattaaagttgagaaagtatgggagtcagttggattatgacgagttattaaaaacaaagtgagagcattgaaggaatttatgagttaatattcaatctcctggcatctctagatgttaaaagcaattttcttgttattttatggtgcatttgaaaaaggcaaaatgagaaaatatggaataatattgagcttcagccacaaataaatattatcagtttttatggcattgcaacacttttctgaatggaattgaagcatgcgtgaagaatcacaaaggacatcaacatgcaacctcagcctccttaatttgaattaatctatcatgggaagcaccaacaactggtcgtctcaaatgcaacaacgtatatgaaaatgatgtcatcttgaaggagcataactattatggggttgttatttatctttgagataaacatggtcattttatcaaggtggaattcctaaccctcgtggagcaaaagcatgggctctcttacaaagcattgatacgactttatggtatgggagctcaaaatatatcttttgtatccaacaatgctcttagattattaatattttcagatttccacacgtttttatctaaatatagatcttatttattttaattttttggtgagttttttaaaagactaactaatcaagttattcactagttaataagagcatataaattatatgctagtgtttatatctttgatcatatactcaattatatttattttcttattatgaataaaatgacatatatatatatctctctttcttttaaaaaaaatattacaacttaaatttaatagatatacacttttatatataggcaattaaaaattatcattttaagtatttgatataatttttcatagagaacttgaaattcagatttttagttaaaaaaacaacatcccttagttaattaatcttgattagggcccctgataaatgacaatgtaaaattttactattagtaataatattttgtaaaaaaattatatttatttatttatttttataaatttaaaatttttattttattttataagaagatgataacaaatcatacatttttattcaatcaactagttaaattcacctttaattttaattaagataaacacgaaaaaattccaataatttgtatgccaaacaaaatagagggaggagcaaagtatgcatagttgactctcaaaaaacattcaaaagagtttcttctcctttcttcgatcgtgctcgtgccacggcgaagatgaagatagcgtggcttctgctgctcctcctggtatcagtctgcgtaacgggttctcaagtttgggccctgaaatcgccgtttcacccgcgagacgtgcttcctctgctgcccagacaggtgtcgtggcccatcctcaaccgcctccacagagcggtggatctcctccccgtcttcgtcggcgccgcctcttcgccggacgacagtctcaagtggaaaggcgcctgcttctacgagaacaaagcctggatggtgtttcacaacaagagcggctctcaatatggcggtggaacccttcacatcaaggtcgcttccttctcaagtgtgggaatggaaatctatgtcacttctttttgttgaaaaaaaaaaaaatcaaattttatgataagtcattcttgttgtaatgaacttttatttaatactaatcggtgaaggactaggtcaacttcgtttcatgaaatcttcattctgagtggttaacaaaaattggtcatactcttgaaatatttcgtagtttttttttgttttttttttttttttttactttaaaaaaattgcttagggagtaggtgtcattaagatttaaagagtgtttttttaatattggaatgcatagattatgttatgtggttgagttgtaatttggtggattttggttggacgtgttgtcatttgaaagcgtattaaattattagaggagactaagttaagtggatttaatgtcgctcagtattttgtatgtcattagagtaatgaaactcttactccccaaatatggtgtatggatggaaataagagagataaagagaataaataaatagagaggaactgatagatgtggcaaatgatgtgatggaaaatgaaaagagaaataggaagaaaaatgggatagatcatagaagtgagatggaagaaaagttgggtgtatgtttagtattttcctattagtctatgcagttctataattgtattctttttatccccccccccccctctctctctctatgtatggatttgggattcaacggaaactgattgataattatctatgtgctgatctaggttagcaatgctcacagttggacgtgcatggatctttatatttttgccaccccttatcgtgtaacatgggattattatttcctggcccgggagcatacgcttgagttcaaagagtgggaagggaaagctgagtatgagtatgtaagtgaccatctttcttctgtacactgtcactaagtagagttttttgaaacttgaaacacacatttttgttttggagatccttatcctctttgcaatcaggtaaaaaaccatgggttatcaattttcctcttgcaagctgggatgttggggacccttcaagcactttgggaggtattgcctctatttacaaatactggatggggggagaactccaatattaaatttttagagaagcatatgggagcttcttttgaagtgcgccctcagccttttgttacaaatgtcagtgctgatgacattcattctggagatttccttgccgtttcgaaaattcgaggtcggtggggtgcttttgagactctagagaagtgggttagtggagcttatgctggtcacactgctgtttgcctaagggactccaatgggaagctttgggttggagagtcaggacatgaaaatgaaaaggtaaaatatttaagttgcattatatctattggttctgtgcaagatttattatatttcatagcaccgttgtcagtatcatatgtttcacgatacaaaggcatacgattcgatttgagcagttggtgactcaattccttgagtgaaacattttgtgcttgaatcaccccatgaatagcaggaatcacataggaattgtagattgcacatgaatcatgtgattttggtgcaagcgaccgcacaccaaagtggttcgggttatgcaggacccagttttgaactttgaagaaccctaaaattgtttttctttacctgaaaaattagtgaaaaagagagggaattggccaattctttccctctaatcaaccgcatggcagcccattgtctccttttcatgttttctactcattcttcttgtcttctactcttctttacctttcccaatctaccctacatgcaagctttgtggtccactcttatttagggtggtcatacactcatactgctgagtttgagcagctactggttttttgtccatatggctgttaagaattggtgattttttttttttgttttgaagcttatgtcactttgtaagcaatttgacttcaaaatgctaacacccccccccccccccccccaaacacacgtgtatgttttaacttttaatatgtttccttatgttaaaatgctcctatgtttatgtttttttaatgaatttgtgcttttatgtcttttttagttgtatatgttatgttttatgattaatcatacagttcaatttgctatctggaaaataggccttccggttcacaatttgaatctcaatttcactaccatgtttcatagtcaattttttttataatttcattaatatttatattttcttccttaagaaaattaacatttcttgaatcctatgcgatgtttaggttttgatataatttatgaagaattgttttaagttccttaagttaccatgtcgtcatcagaatagcaagattatgctctcagtttcagtttgaaattgtgataaaaagttagtgcatggtgattaccaagttaacatatatagattttcttttatgacataattcatgatggttgtttgattgtttgagcaatgatggtaaaagtatagtccatattggtttgtcaactccgcagcggcatttggagttaagttgctagcattttatttcctgcctcaccttttgtttgcagggagaagatataatagctgtgataccatgggaagagtggtgggactttgaactgaatgaagatgattccaatccccatattgctctgcttccattgcaccctgatttgcgtgccaggtttaatgagactgctgcatgggagtatgcactgagcatggcaggaaaaccatatggttaccataacatgatattcagttggatagacactttaaatggaaactatccaccccccttggatgctaatgtggtattaatttaatcagttgttctgcttaaatttcaattcatctgtttcattagattcaactatcttgagtttttgcactattatgccatgctttagcattttttacctacaattttctagcaattgtatgaaatatttcaaacagagaattatataaaccatggctttgatcttgcaagaactcaatgagctttctacttaagttgcttgaatagtataaagttttgcttgaattaccgtaccatatgctggtttatgtatagttatccgtctgccatccagaaagaccattgctattgaagaaaatgttatttcacataaaaaaaaaaaaaagtgatgaatgtggtatcaattattgattgtttgttttctctatcttctgccctttctgtctttttttggtttagccacatgctacatagcttaatgttttatgaatgagcatttacttttgttgctctgcaggttgcttgcgttatgacaatttggagtcaacttcaacctgaatatgcagcaaatatgtggaatgaagccttgaacaaacgacttggaactaaagtatgctgcaatcttgtttcttgctccaatacacacacacacacacacttgaaaaaggagaaataataattttatttcttgatcagaaaatgtattataattaatgctgaaatctcctaaatgtggaaactaggaatttaaataatacgcacagctacgcgaataattcacatgttacaaatgtataacaatgtcatcaatgtgagacaacacaagttggtgaatggatgtctacacacacaaacacacatacatatgtgatactaaacatttttgcttatgctagtaaattgaatcaatgtcttcaattgtctagcataagtcataagatgcttgtgatgtgatatattgcatagattagtaagcaatcagcaatatagaattccacattagtgaaaaaaagtgaaccatgtggcccttttgtgtttctacagggacttgaccttccagaagttttagtagaagttgaaaagcgtggatcatcttttgatgaactactgacgattcctgaacaagattattggacctacagtgatgggaagtcgacttcgtgcattgcttatatacttgagatgtacaaggaggctgggctatttgatccaatttctagttccgttcaagtgacagagtttacggtgagtttgctgggaagtttggtcttttgaattgcttgcaatattatagtaacttttgaatttcatcctacacaatttatacaaatgattgagcatatataatttcttatcatggttgtatagatttctaacaaaatcctttacaaagtgaaatcaggttgttgagcaggattgatatcagttcactacatatattgtttgtgtttctagaagtcaaaaacactttacagtagtatattgacctggcgcatatagacttatttttgtgcaataagtgcagataaaagatgcttacattctcaatttttttgagaacaattctagtcgcttgccaaaatggtgcaatgatggagacacggtgaagcttccttattgtcaaattaaaggcaagtatagaatggaattacctggatacaacaccatgcaaccataccctcatatgaatgaaaagtgtccatctcttcctccaaagtactccagaccccagaattgctagcagtcttcaattttttcctccaatcgaagggctgattgcgtgtgaccagagtttttggtcttctagctttggattgcttaggagatgccaaatgaattattgtttgtatccatttaatgtaaaaagaaattcaaacaattcgatatcgtgtatgtatttattattacaaacttgaacttatattagacattcatgtaattcggattatctatgtagccagattcaacagtgtaaatataagggacttgaatatatgtacatcatgcaaaattaactttaataagtgctatgtaaaatattttgtaagtcttgcatctgcattttttctctctctctctctaaaatgggtttggcagctttgaattgagaacttcaaaaactgtactgagttgtgaaagtagcaatttcgttgtttagtgtttactccaattcagcactctaatgtaagtgttacctgcttttaccatttaaagaacatagacatttgcagatagattaacgcagcgcaatacagatatatcacttttcaaatccggtataaccatgtaactcggaacattaaacaaaggtaagttttctaattttttatttgttttattttatggtcggtgcaagagaattaatcttgcatggccattcatgtgcactgttttgcacacatttccatctttttcatttcgcttcctcttctctttactttcttcatccccatttgatctcttgctcgacctcttgctttagcattaggatttttatactctaatctaatgtagtatgtttatgctctcaactacttttctttcttgctttattttttctctctcacaacactattaatgtctatcattttatatatgcatcaacgtatatctaagttgttgcagcgaaacatcttttagagttgtctaaattgaaggacccttaccaattatatgttttttcacttgaattgcttcaatattgtataatttttcctttgtatagggtttttaatggtcctagactcctactgttctgcttgaatttttccatgttttttttaacattttgtaaagtattttatgaaactcataacagtacgaaaaatacttttcaaaatacaaattaatacttaacatttcggaaagtactttcttagatgtttaaaacaaaatattattctagaaaatacattttggaataatggttatgtaacaatgttatgggtataaagggtatagttaataacaaatattaggtttaaatatttttttcatccctataatttaatattttttttttgctttcactcgtacaatttttgtttcattttagttcttgcaattttatttttaattttcgttcttaaaatactttatatatcactttgaatagtaaaaaatatattttaaatagtaaaaaaagtgttatctaaaacactttgaggaagaaaaaacacacattttgcaagaactggaatatattatttttttcaaagacaaaaatgaaaaaaaatgctaaattgcaggaatttaaacctaaaaattaagaagaagagtgcctctctatatatgaggtcctgggtggtcgcccactttgactgtgtttagggccatcattacttaggcatgcatatttgaagtcaatggttataattgatatatatgtgtgtgtatatataaagaaagctatagaagtgtcttgataattctagatttttctataaagctatagtagtcacatagataatagaaatgtctcgatagttcttaagttaggaaaatgctagaataatgtataatattatttaataatccacccacatatgtagtcagtgaagtgttgcctgtaaatatggaatatgcactctgttgtagtgtgcttttttgagagatcaacacaagctcctccactattgttgagagctacacggccaattattcactattacacttctatacaattcccttgactaagtcaattattactaacctctctaaagccaacgtcaacagccattaaacaatcaatccaattatcttattcctaaaatactaacagtactagtggttatgactgatgagttgatatgcgtgagaccaattttgtaggagatggaacttgctaatacttgtcctatgaaactgcggggtgatcacaaccaagttgtcattcatatcatcacatcaaatctagtctttcacaaaagaacaaagcatattaaggtagattgtcccttcatctgagataaggtccaacataaatcttgtatctacctcttaattatgtcaagacagatgaccaactagcatatgtatttgcaaaagcttttaatgaagtgcatagaaatttaatttgttacgagttgggcatgaaaaacatttatactcccgtttgagtgggagtgctaagagtaaagttttagtctgtatacggtcttgacctatgtgcttgtatgtacttaacctagtaatataaatattaggtaggagtagttatacattataaagtacccaattaaagtttactcatatacccctctatctctatctctctccctctttcactttctctctacaaaatagaaattaaagcttactcaatatcaggtaaatctgatacacatgaagacaacatacaccaaataaataaaactaaaataaaaatatctcagacaatggactgccatgtcttccaaactttggctggtgttatcagattgtgtttcgggagattgcatggaaagcaaaggctcatcatggattgagaaatcgacctctcttacatcaacatcatcaccagatgttcagggatgtcatacttttgacaaacaatgggtctacaatgccatattatacatcatcaccatattatacacgctttatgaaagtcaaagaatatgaaacacatacaacaggaagcaatttaaggaagactaatcaaaattgtgctatatattttcgttcaaacacaaagatgaaacatcaactctgcggctacagaaatttccacaattattattaatcctaacttttcttgaacaatttcaaacatgactaactatgtattcaacaattttaaacaatgtaaatgaacagatatcaatataaacaatcatgctaattttgattcagtgttgcactgcgtggaacctaatgtcgctgattgatgttgtgagggactgaatgatgcaaccaaattctggtggtcaatgcggtgagggacggggtcttgtaaggtaatgtcattaatacttcttctttgacctctattatcggaggcctgacgaagaaaatacttttgggcatggctagccacctgagtaggagttcttgtcttgacaacctttcttgaaatgtttttccaatctcccttttcatataactcaagtccgtggagaaacaacctacatattggtataaagatttgaatcatgagagaaaaacaatgaaacagcaatattaagaaagaaaacactgagagagagacaaacagtacaggtgttcttcttcagtccatctcctgtgctcacgggacttccgtggaggaggccgcgagtgatgattgatctgagagcttggaaattcaacctcggctggcaacaccggaatggaggtgctgtgaagaaacggagtgagagtgttattcccttgatccgatggagacgtggatagagaaggaccctccgacgagacgagtgcctccctatgatgatcttgaagctcactgctgctgttccctcctaacatcgttctcttctaacagttccaattcaacttttctcctttctttctttctttcttcacccactgatgcagatgcagagtgtgtgtgtctctgttctgttgtttccattatatagggtttggcattagcgcgcgccaaatcctctttcctcctctctcttctaacggctactttcttatcaaatggcgccaatgccaagagaagcaaatcttcaccgttggctaattattaaataaataagctgttattaaataaaaacaatccatgtagacatattaagattaaatatatttttggcgttacatgggatacactcgagggtatttgctaaagtttaattttagtagaagggcatcaagtccagaacttttctagatttctcgagcttctacgatcgtgaagaacttgccaactagtctagaatcataacggagataattcctattgaatatgaggcacaactattcaccaaggctttaatagcatctccagcggtaattttaggtgggttgtttcttcttttttttttttttttttgacaggataggtgtgttcttgaagttaagaattgttcttaactgagttcaccattggatgaggatgaagtggatgcaatatgtgagaatcattcgtatataagaatcagtctttttttttttttttttaacgaatataaacagaagtagcctttatcatccaaagctgtaagcaacttatggaccaatttcctcaattcaaagttgaattggttattagacaagttaatgtagttgtccatttgcttgcaagggtaactactgttaatgttagttcccatgattataatcatattccttattttatacggtctttcatcatcaataatatgagctcattccgttttatgtataaaaaaatcagttattaaccatcaaaaataattaagagatgactaattagacccatttaaaaaaatacaaaaagtgctaacttgtgagatctattttaacccacgttactattgaagatgttttaacaatatgtttataaataaaatttagcttggtactcaaagctataaatatatttttcctggatttgaaaacatatcaaaactatttttctcaaatttgaattgtggatataccgcaaagagctcatgtagtattttcatttttgagcaataactagcttattttacttcttaggacgctatccttaactaaaaaaaaaaaaaaacttctcaaagttatgtgggttgggaacaaaatatatggagctcaaaagattttttagaattttaaagggaacttagaaagaatcaaaatcaaagcaacaatgaaaaacatggaaagatgaagaaaatgagaggaaattggctaattcggtaggaagaaagggggagagacactattttctttctttttattttttaaacttaggacttatttgataatccttttaaaacagtttctaattttgaaaataaataaatgtttgataatgtgttttttatcaataaaacttaacttttttatttaattcttattttgttttctaactttaaaatctgttttaaaacagcctcaccaaataaactttatctcccttctttttttcaaaacacaattttcaaaaatgattttacaaattatattttaaagaattttcatcacaagtttaatttcatggttagataagcacaacaagtattagctaatgcaataagcaaaaatttaattcctgggaggcacgcgttagaacctgatctagttgttgacaatgtaatttattccatatttaaagtagactcacaccaagaaatgtaaatttgttgaccagtcaaataaaaaggcttgataaatttcaattggaatttccatcgagtttgtcgagtatgcaacaaataagagccagttttgaatttaagcaacctcagtgataaggtgtgctaagctaagagaaaaaggaaagtagaaaataaaaagagctgcttagagagtgatgaagtactggcccaattctcctacgtgtataaagacaacgacaacacaacattgttccatactttgaaatcactaaagtacaatgatatatcttaaccatctaaggcatgcagatcaaccaacatatctgtattatagtaagcaaatatatgatatatcattatatcatcactcagccttggtggggagatggttgccgccagtcgctaatttgtagagataaaacagagtcatgagagcactgcaagaaaaagacagacaaatatcttaactccatgtacaaactacaggtgactgatgtggagcaattggacaaactcacaaaacataaactaagtaatggctgccagtgcttgattcctgacttcaaattcagaacataatatatagatcttcaaatcagtaatgggaagttaaaaacaaattttagaactagcagaaaacaagttcaggataatggcacataaaaatatttcttttattctcaaaataaatgggaatggtgaagccttgatcttttaaaaagagtttaaagaactttcatggatgcatttacttttaagaaagacaagttcaaggatttataatctacaaactaacaacttatccaacaattaaaacttaaaagtttaaatttagttcttacaactctgagagtaaaagtaaaactatgtttacaatgagtttgggtacttctaatcaatcctttgattacctgattccagcaacaagaccagcaggcataatcttggatgtttccaaatatcgctgccccatgacccaagttagtatggctgcacaagctgtttcacagtatacaaattagaaaaagaaagcatagaaaattactccggctaatatggaccataattaactcagtgatcatggcttatcagattttttttttttatccatagaaatcgaagacaatgtcagggagtttacaacaactcatgcacccttgctcaaccagagcaagacccccttaatatcatagcttatcaaatgaatacagagtaacagacatacattcccagtataaacacagagatactcattgatcctatatatattggtagtaatttagtataacttatgacttactaaaatattcttgcttaattttgagttttgacatatgataatgcaatgtgatacatctatacccctgctagagtttctgtgcatactttttattactaagtaggagcaatgcaagtcattaacttaatgataataaacttgttatattcataagcattttaaatcaaaaaaattctgtcaagaaattttactttcaatcgaataatatttgttacaaacacatccccctcctttgatcttttatatttatcattatattctaaaacatgggcttatattcgaagctaaagcaaaaagctctagttatagtcttgtaggacaaaccatgttccacttcatcaactatactaatgacaaaagtgtatggggcaagatccaagtctgataaataagcaatggaaatttgaaaaccatgcacccaatatatcttgatcaggttacatacattcattgatgcttccttggcattcaatattgtgcacagacaccctctttcagatctatgtatcactttccctccatcaggtagacaccctattaacctatcctaacctaacctaacaaatccccttccttttaatagaaagtagtaaatgaaaaagcaccatcattcaatatctttgaaacccaaagagcatttaggcagagtttcgataaacatttcaacaaacacctaacgcaaatccagagggtaaaataaaatagatcagacttctcccacaagttaaaacaacatatgcatcttaaagttttcataagtcgatacttgagctgcattattttaggagaacatggaattactaatctaaatatcaccatgacatcctaagagagagaatccaaatccagaatttcatacaatccgaaaaaatgaatccaataaatatccacatctttccatcaaataacaaattctagcatagaacacgtttcagatccagaatcatcgagagccaggtcaacaatcacacccaaaataataataataataataataataataataataataataataataataatgaaaggaaagaaattataggataccggtctctagaaagagagcgaggtaagagttttttcgtttgccgaaggcattgagactgagatagccggcgatgatgagaagcaaaccggagccggcgcctccggcgagagaagcgatgctccctttgcttatgtaggcgaacagtccaccacccactagcatcaatccgtacggaatcgtgaagcagaaatcgtgcatttttctctccttagatgccttcaatcggaagaaagattggaactgggaagtgacgatgggagcgtgtggaatgcacaagtcaaatattaacaccccacgaaaccctccacctgctccttaagaatcattcccacaatctaccgtctcatttttttaaactgttatgttatatttttttttaagaaaattcattttataaaaggagtttattttttattaaatcttaataaattacaatgacacctatttggtctaagggcatcactaatccaagatacctaagaaactcaatttgaatatcatgaaatatataaaatcatttatagtgatcccaaaatgtcatcatttttaagatactcacatgtaaattttctcgagaaattttttttacgaaataggttttaagaaaaacaaactaaatagagtagttttaaaattacttatatgttacgggttgtcacttaggataaggtgttatccaaatggtactttgtgttaattttttattttttagcatataagaggcatcgttttctagttttggttatacacttttttatatttacaacatttaaaaaaacaaatttcatcgattctaaatataattaatgtaaaaaaatatattgatcgttactcaagaaaacacatcctgcatggcaaaaacaattcatgttatataaatagttttgaacataactctatttatattatataagtaatttttttaaaacctactttagcaacaaaaaaaaaagttaaaaaactcacatttttatatttttaaattttcatttaattatgtttcaaacaaattataacaatttataacacttaaaagtcgttacaatatatttaaaatttttcaaataaattattaaatcattgatataagtgataccaaattcaatccttttaaataaagtatttaatttgagtcatgttgatgaataatatttgactgggataaaaaaattcattaaaaatgattagataaattttttaataaaaattaatcatcattaataaatattaataaaaagataaaaaaatttatccaaacaattttttacaatttttaacaaaaaaaagtaataaaaaatatcacgtcatcacttacaacattaaactcttttggaaacaaagaaaggaccaaaatattaaaggaaaaaaagtctgggaaccaagatccaagacccgtttccgaaatattgaagataaaaactataagagttgaaaaaagtttaggaattaaaaatattgtttatcctttaaaattcataaaaaaaaaaaaaaaaatccctattcaaaccgttttagggttttggtagcagcccaagctaataatggtggcttttcttggtacccgaatccggagcatcacctggttcaggttcaacccttcacacagccacaagctctttcagcggagagccctggagatttcgatgtcgacaatgcaacagggccaatctaaaagacccatttgcccttcttgttccaaacccagccgaacgtgtctctgctctcgaatcctcacaccgggtctccaaaattctgtgcatgtaaccatcctacagcacgcgctagagcgtaagcatcccctcaattctaccagaatcgctatattgggcctcaagaatctcaccgttgcaactgtttctgatgttaatttcgaagcccggttcctaattcggttgttggatccgaattcccattccggtcatgctggaaacgagccaactgcattgttttctcgccagtgttgggaaattggagacacccagaaattgctttctgagatagattctaacttgattgataccgatagtgctggaaaatgtggtttgagaaatgatgttggagatgttctggattctgcttctaatgtagaagttgtgaaacaagtgagtatcagtgatggtgaagtggtgaacgatgaagttgagaaaaatgcaattagtctaaagtgtgatttagctagaggtgtacatgaagagaatggaaagctagctgttactgttaccattggcaaatatggtgccattagctctttgtctcatatttggatgactcaagcacaatgtcaatcccccaagttaagctttgacaatattttggcgtaccctgaagcttgtgaagcactctcaacagggtttttggtgaagaagtttcagaggaagcaactgaatagggatgaaaaattggaagaatgtgatgaatttgagcttgaggttcgtcctggatcggtactactatttccctctgataaggctgttgatgttagtaacctggatgctataggttttgaggtgaagaacttgattgttctggatggaacatgggctaaggcaaaaagaatttatagtgaaaatccttggttgaacattttgccacacgtgaagttggaagtgaatgagacaagcttatatagtgatgtgagacatcagcctaaagctggttatttgtccaccattgaaagcattgtatttgccttgaaggcagttggggagttgaatcatgagggtttggatggtctcttggatacttttgagtccatggttggagatcagagacgctgtaaagaggagagactgagcaaacacttttcctgttgaggtcctttcttcttttgattgaacaactcgaagaagttgcttcaacccaaaatagaatctattggcaataagttatgaaccatgaaacttgtaagagttttttttgcctccatatcctttccctgcatgcaaaacacaacatgggaatcccagtggattatctgtataatgatatgcatggagaactccactccaatgagtttattgaaacttaacagattattgctgtgccacatctgctgaacaaggacaggagcagtctgagataaagcaatcagttactggttgaaattgaactatgctaagagggtgggaatttgtatcgatgttttagcacaattatatttttaagattggacaatgcactgaatgatgtctttagaatcaagacaattttgcagtttgtagtgttactactgctatatgacctgacctacatgtttacactgaatggaagacattatgtgattgcatattgctagagtctctcctcaagaaagtaggggagagcatgttccccgagaacttttggacagaatcatggctgctcatgcttgctgatttcaacttcaagccaagagacgttgcaagcaccaagctggaccattaatgattacagaaacctcagcagaaactgacagtgccaaagttacccattttctaaccacttgatgatgatgatgatgatgatgtgaaatagagttaattgttaacaaaacaacatggagaaacaaaacctaaaagagaggaggaaggggaaagatgttacctgcctaaattcaccagatacagatatttgtttagaactcagtttgtattcacactttataaaatcactgtgatggcataaatgtaattagattctatttagcagatttcatgtgttgatgtatattggataaatcagtttcagtacttcaagacagaataggccaacccagtagtttccacttaatgcttaattatccactctgctgtttttaccgttctattcttagattgctgatttacattctatcatatcccatttccctggtatcagcgaacaatgatttcagatttaaggcattttgttagttagaccttcgtgaatcccagtaatcttcacggctttactcgttgcatgactctagaatcataatctaaaatctcaatgtcagtcaagaatataaaacatacatgtttattgctggttattaagtacgctaagttttagttttctatatagaaatcagaaaccaatcttataagttcagacaaaacaagcaacaccatcacttgcaaagtgacaactagccttatacctcagtttactcactctgctgctagtagtgatacaaactaaactaaggacttgtctaatcatcaatatttacataacttttgctaatccacgtagttctgagtttagggcgtcaaaattctgagttcatgtgtcttctgatcaacgcatcctgaactgaccaaagaggttatccagatatcatcagcttttactggttcatcatcatcattcctatgccaactccagaaggcatgagtggagtttacaatcttcagctcaccatgaccaaaactggcttcacggaattctgaccactttggctgtgggtttatatacctgtcaacaaacaattatgtaaggatacatgcagcaacaatgacggaaaaacaaatttcaggctgcatacatgataaacctcaatatagctttttttttttttttttcacataataaaggattcagaaaacagatttctgtgggatgtttctggctgtgaaacttacttatgagctaagccttctctgtttcctccatcaccaatagttatatggacagcaccacagggatccaatcttccattatacacacgtttctgacaatgagatagagtattaaaacccagtttctactaaatggtgcttacagagaaaataaaatgctaaaacataaagacatactgaacgttcataagcgtgaacatgaccagcgataactaaatcaacactggcagcataaagcaatggctccatcgctgccatcatatcatcccctgcaccttgatgagccttgttactattataccatggcacatgaaataacacaagcagccaaggtgtccttttcctatctacctttgacagatcttcctgtagatgagggatgagtaaaaattaaagagtgaaaaaaaaagtggtccaaactccaaagtacttttctttttaaaatgatagagtagtgtaaaaaagacaaataaaaataataataacaagcatgattgtgtagttttccatggtcatggattggattacacttatccaatttttagtaactcttgatcaataggtgagatcaactaacctttagccatctgtattgttcagagtacacatcataatctgcataggagccaagcatgataacgtgaacacctgcaacttcaaatgaataatagagatttgaagttgatccactttcctcagatggcattttccatctggaattataggacacaaactcatccgttaagaatagtatgttctcctcttcatggtttccctctgtcaccatccacggccttgtactcgcaagcggctccacaagtttcccaaaattgtcccacagatgctgcatacaatcagcatatgaaaggtctcctggtagcaggtagacatcatatttacattggtctatgtgtgccagtgttgatttagtccaaccagtttgacccagatccccagccacagcaaaagtaattggaaattgagctggaggagttttgagctcaaactcgggaccttttccaccacatcggtagaagtacacagtattgtcttccaaagggccaattacggcatggtgtatctttcccgagctgtataacagatagttataagaagtgtactctccttcagctattgagtcatatctcccaggcaatgttccgtattctacatatgaaggtgaatgtttatcatcggttatccatgtaactctcatgtgcttgtctcctgccaaagaaatgtgtacctggaacaaaaatttggtatcaaagaaactgaaatttaatagtcaccataaaagaacatgcataaaagactaactaaagaggctgatatgattgcttaatagaggaagcacggttgacagttcacagaatatttgtcctagaattggcaaataattcatagaaagcgaaacaaactgttcaagttacataatattagctgataaataataatcattgtctgtacagatatatactataagaaatcaccaaccataacgaataaaaaatgtcttttgaagatttgtgactagaacccagatcatgaactataaatccaatacaagagtgacagaaaattattggatcaactttgaatttcataaccaaagaaaccgtgcagggctatatcttgaaccccggagacatgctcccatcgtcactgtcttaaaaatcatatcaaagacgatttctgaatgattaacaatatgattttttttattctacgtagaaattaaagtcaacaacttgaaatagagaataattttgaaaatatcaccctataaaaaaaaaaatgaaccctcccaactgaacaacataatccaatcaaaatacgaaagaaatcaggtactgtgagttgatcaagtgggaaataaataacacaaagtgggtgatgatatagtactatttatttatgaatatgaacatgatgaatgaaaaagagtttgattgacctgttgagggtaagaggagtgggccttggaaattgaatcccatgggatggttaaggttttacgaggaagagatcgaacgtattcaggcgtggcaatagcaaaaagaagcgttagaatcagaagaagcagttgttgtttgagttccatgataacagtaacagtaactacctggctgagacaacaatgtacttccgcttcaatctttgtttctatcatcacccatcctcatgacatcaccaaatatgtcgttgcctcactttttccgctttgtttcgtagataaaacgaaaccacgctttcataattttcttaacaattaaaatatatttttagttttctatgagttttattcctttaaaatctgaaatcaatatttttttttttgttttcattgttcatttaaatataaataaataatatttgttaatttaattaattttctcaatactaaaagaaaaaatgttaaaaaaaacatgatactataccatacaaatatatttatttcagtttaatttaaacaaaatcacttaataacacaaataaaatgaggaaatacaacataaaaactgcagatgtattaaactatgaagcacggacacggcaaaacaccgacagaatcgcgtcggacacgacccgacacgccgacacacaccgacatgctccgacatggtgtcggacacgcggtcaacatctccgactcgttgaccgtcgccaacacgcgaatttgaccgtgtccgacactgctctgctcgttcctctcttctcattcccttctcgttcccttttcgcgcctccttctcgttcccttcttgttcgcgcctccttctctccaccgttcgcgtcaccggtgctgctccatcctccttctctccgccgttcgcgcgtccttctcgccctctcttcctccgccgtttgcgctccttctctccctctcttcctctgccgttcgcgctccttctctccctctcttctctccgccgttcgtgcctcacacagataaggtgactgtggacatgtggttgtgttttaattgctattagcttagattttttaggttttctctttttagttttttttattaaaaaaaccatttatgtattctgcagtatttttttaattgcttgtgaccttgtgtatggcttgtgttatttgaacccccaatttctttaattctatctatgaacccctaatttctttgatatatttctttcactgtgaatctttgatataatgttatttttatttttataatacttgataatttaatgtatgtttgaaactgaatcttgtatctgacttgtgctttttttatatttttaatacttgataatttgttaatttgatgtatgtttgagattgaaccagtgaatcttgtaacctttttttgtgctatttttatttttttaatacctaataatttgatattattagtttagtttaatttttttgttaagttattgaatattaaatgaaatatacattatataaattaaaaatatgatttaatattaaaatgtgtcccaacgtgtcgaaatcaataattttttaagattgacgtgtcggagagtcgagtcgtgtcgtgtcacgtgtcgcgtgtcggagtcggtgctacataggtattaaattaggattttagaatattagtttggtataataaaccttttggattttacaagactttggatgaatgtagtgaattttaagattttgtaaaaatatttttatgattaaaactttgtagtttgaattttaaaagatttataacatattaatttataaaatttgagaagattttatagatttacaaagttttaataacttcactgaatttttagaaaacattataggttattagggtcaataaaaaaaatgttactgtttagataaaaaagagtgtaaccaatataaaattttccattatattaatagttaatttattctgtcttcccatttaatgtttcttcacataatttattaagcctatctgtattaaaatcttcttgtttatgcaattggatttgaaccaaaaatttaaatttatgatatttgttaattgataatactgaaaataatgaatcatatgttaattcaattgaaaattcattatcataatgacgttttttatgaagaaatttatgaatgtgtatatcatttttaacgaaaagaaaaatatattatgtgtgattaaataaaagaaaagcctgatcaacaataaaaaaagaaaaaaatattagaaaatctcaagagtttagtgtaataatttgttgagtgttatactaaaaaaatcttataaaattatccaaatttatgctgaaaaattcataaaaaaactgtattttttttaatactatataaggcttttttataagttataaaaattattaatgaaggttacaaacataaaaatgtccaaatccatcccaataaatcactatcaataacattacgaacaatctcctcactgttgagagtttcaaacttaatcatgtgggtgtgcgcataaattatccatgtgcacctatgctggacaaaggtagagtcttgtccttttaatatatagtattgggtccattgactcaaattttatttccattatatttaactcaacattagaaaacccaattttctaatatacacaattctttgatgaattaaacaatattgctttgtatgtttaatatattttggtgaagtttgtctaactgtatatttggttaaagatatgaacttacattttagaaaaatacgaatttagttaatttgctaattatttactcaaattgtatgcttgtttaaagagtaagagataaaaaataaaaagaaaaaatagaagcaatattttaaaaaaaaatgagaaaaagcataagacaaaatgattttaagattttttttctttcaaaattccatgtctttcattttttttcttcttaaattcaaaatttattttttctccctttattttacgagtttgttgcacaaccaattacttatatattttaaagataaattattataaattttatatatctctaatatatttttcaaatcataggatacagattacttaataatagattgtaattatatttaaaaataaaattattagagtatgagataaaattttaattattttgtgtctgataaacataaaaaaatttatactaatgaattattaacaattatataaataaatttaatatcatatcttaatttaaaattttaaaactcacatttataagtattttttttatttatataatgtttaacttttttatatttattcgatttgagacttctacctatatttatatttcaataaaattttataattaaattaaataacatataaataaataaaagaacaaataaaaaattaactatttatttatatttaaataaaaatattgattaaagtggaccattattcagcctgttatttattagagagaggaactacgtcgtttaggaagggacattaatggttggtaaacacaaaaaccctaaaccctaccagcagctcagcgcgaaagccgtaaatcaatataacagttggttctctcacactcttgacttttaagttctgcagacagcaagaagaagcataagcagaagaaccaaaactgaaaccaaaatcaaacgtttaagcttcgttttggtacgaaaccctagcaatggcgtcctccatagcgtcgcaattagaagctatcagatccttcgccaaaaccgactctgaccctctcaagaggccactcactcgcccttccatcttgtatgatcccaaaaaagcggctgacatctccaccgaggctattttcaccgaagctcttcgaggtcaatcttctcatttttaatttcgctcttttcaacatagctagtgcaactaaagcaatccagtaaaccgaattaatttctcagtgattaacatggagcatattcttagaatgtgggtttggacctaactcaaccctaccccaaaagctagctcatagggtgaggattatcccccacttatatactctatcttgacactatctctagacaacgtcggacttgggtttttcttaatacatatgaattacggtgctactttatattctattttcgtttgattttgttctgtttttcttatgtgatgcaatatttcaggcttagagattcttattggcatggatgagcggttcaggaaccataagaacgatttgtttaaccacaggcgtatagagttggatagagagttgatgggaatagaacagaacaatcaacttaatgtctccattgcttcatacttgaaactactttctggatattttcttcatacggccgcccttcaaacgcttgagtacttgatacgtagacacaagtgagctttcaacaatgtattatgaattgttttcttcctaggggtgttgtgttgataatcacattttgcctctgcctagtttaccttttttgtgatttttgatgtggttgttttgagtttcaggattcatgtatacaacaacgaggatttgattttgtgtgctttgccgtaccacgacgagcctgaatttgttcgaatagtacagatacttgatacaaggttaggaagatattattatgtgtttttggtttggttgtgatgtagactactactggttggagaggcttctgatgtttctgttaatttatgtgaaggaatactaaatgggggtttcttgatggtgtgaaagcctctggtgcacggctgcctagaatggtcatagtgcagcagtgcatccgtgataagggcatattagacgctctatgcaactatgtgagtaattgttttgcgtttagttgtgaatgtggaagttctctagtggaatcaaataattatatggctaaggatttggttacaggcatctccgtcaaaaaagtctcgaccttcaatgcctgcaattcgcttttgtactgctgttttcgttgaagttttgggtactgttgtgactgttgatgatgatcttgtaaagaggatacttccctttgtgagtcttcagcctggcattaagggggtttcagatcacaaggttagcttcctaggaaattattttccatgtattaaattttaaaactgattatagttgggtatcatactgtcatatttttgtgattaccttctcattagtaggcaatgtaattgctatcaaatggtagactgcgaaataaatttgctcttttgctctacaatatccaccagtgtaatattattcatcacagataggaatagtagtgcataattttttatgttagtatagtcataaaatatgattatatgactgggtgaccttacttttagtgcttatttgatctgttgaaattatggggttttaggtatagagggagttaaagaagagaatagaagctttgaatgatattctactgattatttgaccttactttttatgttggttgtggtgcaaaaatttggagaaaggctttcacatgcctttccacgtttgggcttgcaaccttagggatattttttgtaagcaggggacagtttaatctctctcacctgtctggggggttttaggtccatcctgtttatggcaccttaattcatgttttctatgtattagtgtgccataggctgggttttgttatcatggactgttttctgctttctttttgtatctatccttttttctcatatatataatatatacttttgctgatcaaaaaaaaaaaaaactgattattacgatgaattgccatgtcttggatggtatattcatgaaatccgaagtactaactcttatttatattaatcatagagcaatcctgagagataatggaagtataggaagactaatcctaaaacataatctaagatactctaacatatgataaaatattttcacatattccaacaatatatgtatacttgtgtatttgagctatgtttcttggctccctctcctgcattttttttgttgtcaaattgtccttatttacaattagcagctggaagctcactttcttgtgctttcttttttggttttctatttgcaggctggttctcttatgatcattggtttgcttggaaacaaaactgcattagctcctaaacttttgaatagtttgatacgtttggttgccgaggttgctcgtcaggaggctacagagttgacagatctccattggtttcggttgtcccttattaccttaattagtcttgttcaggtactagtgtaatcctgtgtgcttgtgtatggtttaaacggaggcattaatccttttttttgttgggggggggggtggtgtaattggtatttcatccaatttcctttcattgtgcaatatctatttctgaatggctatatttttattttaatttgttctgttggaattttcttagtctcaaaatgttgaaatactcccattgaaggccttggagatattaaaggaaataaggtagtcttcctcgaacttctcatcatatgcataatcactgtgctttgactgttgccttttctttatttatatttatgatttattaaatcccttttcatatagggacctggcaggggttttattagaattatctaaggagttcaatatcgaaaagtttctcctcgtgcttttggactccctgattgactgcaggtgtgtttcctatgattgtctttcaggagatatatgctttaagtcatatcttatagaagcttgtgttttatgctgattataacaataacacatttgcagttcttcagatgaatactgtcagcggactttgctatccttaatagaaaaagtccccgtacatggtcttgtttatcatgtggtcaccaagatcctttcaaattgtgtgaaattatcacaaaaagttagcgactcaacttcttccatgtcaggtgtgtattctgattttgaattttagaatgctgatcactatcctgtaccccaaattatatatcctggtgtgcttcataaggttgatctaataattcataccaagagtgaatcaataaatttctgaagaaaataatatttaatgaaaatctcatttggtgattgagaaatctcatctaaacttctgtaaaaaaattgtttgaatacctgtgtgaaaatgttcttctgaattctgaaagcaatgaccatggatgcattttaagttacttggaaatttctttcaccatgaagatcttactttgtgtttgtataagcttattttggaggcgaagaaatttttttggcagcttatctggaaattattccccccgacacagaacttttcaaacatgcaatagatacatgatattaaaagtggtttacttagcagttaatttgttttctatatcaatattatgtaagtaataaaatgtttgtccagactgtataaatagtaagaactggtgtttgaaacaccagaacaaaagcattgcattataccaaatgctgtcatcactctccatttctacagtatgaaaagcatttctcaattaagagccaaactcttggattacgctggttacaatgccttgttttcaaagaatcttactccattctttaacagtttaaccctgtgttgaaactgataaaagaaaattggaatttgatgttgaagtctaatgtgtgccttcaggaagggaagttttatttgttaagaaactacatactcttttttttcaactgtaaataaatagatttataaagaaacccagagaccatgaaagatacttatgaagacaggaaattgcacatactactgtcctatacattaatgctgctaacaatccttgttgataccaactctgttttggccaagtttgagtgtgaaactgctttaaagcagttgaataagtgatttaaaacaaatttggtgtgttgtaaacaaaccctctaatgaactagatatcttcaaattgtgtatctcactatatggcttatgatttgtctatgtgtatcatgcatgcatgttatgtcttcattagtcagtgtactttgttttacttgcttcagcttggaaattcaaatttcttttgaagaagtttcgttgatttctgtgtaaattattattgtcaggttttgctcctgaataattttgttttcttttcttatggtgttttttttttttttaatcatttagctccatatggtttacctttatcttttttactagaaatctacaactagtcagttatcatttgttgcctagcttattattctcataatgttggtttgccaaatgttgattagttgggtgggcaaaaaagattctgtttgttgtcaatacaaaatacccttctgaattacgaggtgctgctcatcatttccttcaggtatgctgatgagttgtctgcttttttgttgttgtcatgcattgtcagatagtatataatggcttgaactttgaacatgttcaacaggataataaagggcattctaagaaagatgattcattgtataaggttttatgtaagatgttggatgggagtatggattcgtcacttggtatttcagactcaaatatttggttgggcctgtatcatccaaaggtatcaatcgttgacctattcttgattattaggtgtatgtaaatataaaagtatgtattctcctgttcaacaatgataatttttttataattgtaagagcttcatgatttatatttgatatggtggtctaggctgatgttcgacgtgctacgctgcttgatttaaataattccgttatcctgaaaaccaaggcagttggttcagaggtatatatgctctgttaatcttctcgtcctcccaaaacctcatgtttccattaatttgtattttttgtttatgacaatgtttgaagaacatctttgatgtgctccttttggttggaaaaaagttgaaacttcttgcttgatgtggtttatttcctttatatatctgtcctcccaaaactgcatgtttgaaatttgtatttttcatttatgacactggttgaagaacagccttgatgtttctctttttgggtggcagaactattaaaattttgcttgatgtgttttctgttttgcacacacacacaatgagggattgttttctgatgttgaccttgagttttattatttgtagtttgggcttggacccatgaatagctactatgcttagggaccctaaacctatatatttccttgtaatctgagtacattgtaacgagtgtgtgaggaaaatatagagaatagttggacgtagcccacattgggtgaaccagcgtaaacactacgtgttattttcttcttccttttcttctctttccgctctctcgattgttgtgtgattgcttggtaccaacacttacatcattcagtaactttttattggataaatttatctcgttacccattgttggattaaaagttcctatcatatctacagaattttagattaattcaattttttttatacatcattcagttcttcaaaattaatgttatatatacttctgacatataaaatcaaacccattcgattttcttcttattgttgttcatattttagaagatttgacatagataattttggtaatatataattataattcaatagttggcaaaaattacatttcataatgatgtaagagtaagtgtgatttacaacggtgtaaattaattcctctttaagtgtgtgtaatttctgatggtggtggcatattacttctctttgattttttatttttatttttaggaaatggttgcattacaaaattttgctgtcaaactagttttatttggaaatattttttgatacatttaagttccattttgaatgatttgaactgagatgcatttgtgatctaatttgtcaaggccactgattttacacattgttggtgagggagggtataattgatttttgttagaaaacttcatttgaaagagtaggtgtacaaggagggaggagtatatatccctcaaaagccacctcaacttcatttgaaccgagccaggtaataaaggcttagcaaaaagtgaagaccacagaactcaatattaaaccctgatatctttacaacactgtcaaaatgcaaaagtgaaacccctctgtaaactgagccttgaaccacgatgaactcaagggcacaaatctgtccaaaagaaagtgtggtggtggaaaatgctataaaaatttattgcatcatgcttcattgtcaaacacaaacaccaattgctagtaagaagtactcagtaccaatggtaccattatttagtacttggtatgctataattaattatatttataagccataaattaattgattatcacgtgggttatgctgtttttatgtgaaattatgggttgatttcatgttgacttagggaaatctttataatatggtcaaagttcttgctaggatgtgttaatactgtttttccatattcaaagtcttcaacctttagctaaccccaaaagtcatcttttttatcagaatcttgtaagcatccaagaggacatcttaagacagcttgatgataaagatctaacagttgttcaagcagctttacgtgttgatggcttgcgaaatgtaatagattcttctaagcttcttgatgcactacagaatgtgctaaaaagatgcactggcaaactgctgtcaggtaatttgtggtatattaaaaataattagatagatatcatctttattgtttctgcatgttgtattgaagcaatacataccatgcatcgatttatccataaactgggaaaaggaatttgttctttgaatgcattcttgatggatgatgattgatgactgttaggggatggtggggttacgtgcagaatacagatgtggtctcataaatgtctaagcttccttaatgtgtttccaatggttcaaaatatgcttatgcttattcttctgtgtattttgggattgatttactctattgaacttatattatttcccttttctttttgaagggtgtctggttgtccatttttatgtttattttatcaaaatatgcttttactttatgttgactagatacatataagcatataaccttcatttcatacacttattccagttgtgcttctgttactggagtatatttgtcctcattaagttatggctagttgtttcctgtctttgacaagtaaacttatttcagttctgttgtaaccatggataaggatgaatttggcttcccagagatgtttgtatttagatattctttaaacaaatggtctttgcttggttccttactaatgattcattcaacgatgatgcatctatcccaagattgggtgggaggattacataactgaataaaaaaaaattatgctcttaattcactgcatgtattatgcacccattctcttcttgtaggttcagctgataactatagtctaaatgttgaagttgctgtcacttgtctaaagaatgccatctcctacttcagtgatcatgctgattacttgaagaatgttgctgctatgatttttccattactccttgttctaccacaggtagtggttaacatcatatttaatatttgtttttcggatagaaaattaatatattttgatcttgtacttatttaatagcttttagattttcccgtctctgggtaattatcaaataacaacttattttgccatgcgcagacacagagcttgaatttaaaggctttgggacttgtcaacaaaataaactggccactttatcagaatattgttgtatcttcttttggagaaggggtaaatatctactttggaattagtttgctataaatttaacgtacacttacaatatgaagaaatttaattctgttgctcaacaaggcaaatttgtcaaactgaagatcctataaagaattttccaaggtgaactgaagatatgaatcaagcattaggtcctgtctcctttggaaaaccaaaactttgaaatttgaaatgcacattttttacagatattatgtagggaataacccaattgcaccatgaatagtctagtacatgaacatgatatgttactacttactagtagtacttgtagtgtgggttttctaaaaagatatttttggtttcatcatatttctaagttgttaatcagtaatcacaacaattcatgaatatgtttatgtcagatgaaattgtcaatcatcttttactttagtgactcttgaagtaaaatcgcagacattgatacctggaagtttatcttcaattaacttgaagactattgataacatggctaagaatttcatggtccatcccaaagagcatatagcttggtttgttgaaagctgcagtgatttggagttgtcaaagacactcttcttttttgttcttttgcagtctcttttgataaaaccaaaaggtttgttttccccttctctttttgaattccattttaatatttttcagaaatagttaataatcttatatcgtataatgactaaaaacaagtaatgtttgaacaaataagctagaaataaatgtttgaagcatatcttatacatcccatagttgtacttttgtcttctctattagatttcttagccaaaaaatttcaagaggggactaaggaatgataaatattgactttttccttttgatcaaagatgaagacatttgtgcactatttgaatgtgtatttcctattctaaaggctgagtgggaaacgtcagtgacagctggtgatgtctcattggatgaggtacaaaggatttactagcatatttgtgcttttatttcattatttgtttactttttttgtaatgagaagctaatgttttacttctgttttgattgttgggaattcgggttgttttgcagttcaagtctgaagtgttagactgggattgcagtgcattctttaatgatcttttgtatgtcaagctgagccatcttaatgtgaagcttatgatttgcatattttggaggctagcacaactaatatcagtactaacttctgacattctgcttgtaagtaattcctttactatttgtaatcctgttatctattgtcttatgaacttgctttccttcttggaatttgttgttgttagactctcaccgtcaacattggttggatattaacctttttcaaaatgcagcatgacgatgataagtgggtcagcaagataagggatctgtttgtattttttgcttcatctaaattgaagcatgcattccatgaacacctccattacttagcagcgcagtgcagaatatcacctccccgcctcttatctaagtttttcacagaagaaggtgctatacacttattccttttgtttgatttttcccatattttacttggccaatgttgtgttccttctactgtgaaattactgcctgtgttatggtgtagaaaatgagaaagaaaattttctgaatgtacttgattgtattttctacccagtagagtgaactgtttatattcaacaatattgcaaagataatcaatgccgaaacaatttaacaagagaacaatttagatgccactacttcctaagatgcattgatcctgactataccaagtatctaggatacttggaaaaataatcattaaaggagctctattctcctaaaatgttcgtatttcaaagggagagaatagaactattttttctgtaattatcatgatctctcatgcataataatgaatacacgcagacacacatatttgctgtttagaaggtacaaaatttatatttgtagttattctctttctccttttcctattctttttactccattttcaattattttgtatatccctgataaatccttccatcccccgttaggggcattttcatcctgaccaatccatgtttaggtgttaaagtggctgttttgtgttaggctttctgtatcctacttgtttgacttgtattcagtcagaagtaagctgccagtttttagttagagacagttatgggttcactctattgtaacagattcagaggtgatacacttttgaatatgttttgatttcagatctagaacaatctttttctctcaaatctctcttgccaactttctctttggttcttaaaatctaacttggtatcaaacgctgtattttggtgttcatcaatggtttccccttcaaattcatttaaaagctaagatattatcctaaatctgaaagcacctccaccaaaaactcctttgatccttgcatctgctcctttgatactttcttggacatgatttctgttcacttggatgagaagaacttattccatcacattttctctccaaagcagatcaagatatcggtcgagtcagtgaggtttatctcacgtcaaaagagcttgtgtatatctatgtatgtctgactccagtctaaagcaataatattttttgcattactacatataagcccaactccagtttgtttcgtccatctatgcaaatgcaattaagttatagtttttttttttttgggggggggggagggggagggagttgattgaaatcatggttgtttgaattgatatttttaacattttatgaatcagaagtcagataaaattcaattggcatatttgatattttttggttgaatctttcattctgcaggtgttcctgctgcagtccaggttgaaagtcttcaatgctatgcatttctttgtagcctgtcacaagataaatggcaaattgaacttttagctgaatttccttctgttcttgttccattggcgagtgataatcaggtatgattctttgttagcgttactctctgaccttgtgtggattttttctcattttctgcaaactgccaatttataattgttgacaaatggttatcctctgttacttttttggcttttttctttctgagaaaatgtgctcaaatgatttctttgcatcgttttgaattttcttccagactataagggttgctgccttgaactgtatcgattcattgcgtacattgtggtgtcatgttgagcgttctggaaagaaaaatggtactccattgtcagaataatttgatgtagccctcaatgcctaattaattttaccttggaactttataagtttctaaattgatatgaacaggtaacaatgcaatgtggatccattttgtgggtgatgttttggcgttgatggatcagcaaaaaacattcatattgtctgacaagaaatttcttccctcattgtttgcgtctgctatgagctcatcctgtccaaacatcttggagcctcgaaatatcttggtacctcaaaatatagaaaaaaggtatttatgatgttactatgacaattatcatttcattgtcaccaatattattaccttagaactatttgttatattcattgccttagctgctactcatcaaatatgaccatgctctcttgttctgttgttggaattagctagatcttcttaaatgtggagagcagcattccccttttctttttaaaatctaaatgatataatgtttgacaactgacagtaaatttccctttgtcacgggaaatgatggttctgttgctgttcattgtctccattgtaacaactcaaagttcataaggattggagggatgcatgacacaaataaagtcatacagggaaggggaaagtaaatttaagggtgggaggagaaagaaatggaaatttaggtagatggcatagagggttctctaggaggttcattcaatgttaaatgtgactatatatatatatatacatatatattataaacagctgagaattaaaatggtactgaaccaatgcataaactgtaggatggaaccttaacttgacagttgaatgatcctatttttattcaaaacctgtttattcaaaatcctaacttagtacaaatgctaatcaattatattgcttataaattttgtaattatgggttttcacttgagagctgtttttatctattgtgttgttctacttctttattatggttgttctagaatgattgcttatcttcttcttgtccttatttatttcctctagatgaattcttcgataaacttgaaacaagaaattatgataaattccaaactaagcaatatgacactagtttggagtattttattaaattgcatccttaggctttagtgtgcatgtgtatgtgtctctattatatgaccaattgacattaagtgtcaaattttatataacatcaaaccctattccttccttctcctttaatctaaaaaaggccaggattgattcactgaaccaatcacttgattaactgttttctcttcctgctacatgggcccggcctttgtatttttattgcttttgattcttttttccttgctgagtgctgacgagattgtgataagagttcttggctagtgtttccttttgggctatgaagatatagccatgaatggagtcattgcaaaaatactaattgtaaatatactctcttcctaagaaagttcaagcaggcaaagttgctttatgtaccatacataaagacaagtctctagtagagactctctacaatcaaagaagccagcgaccattaattaaatgaaaatatgacattataaactagaatctcataagcgtcccgaagcgatccttttgggtcaccatgaaagcattaaaggataatgaaaggtaggatttggtggcaatataaaatttgacacatcatgtacagtcacatatagactttaacattgttttattttctttacatataagctttagtgtttttgtttgtttaatgttacgtgttgtgcggcttacctttttagtggactttaagctgctgttttgtgttattgagattgattgttgggatagaataggtttagaatattctgttgttattggttctgatacttacgctcattgtttgatgcatatatctgtgagtcttatcttgtaactttccccatcttacttttaccttttcattttgcttgttagtttctgtttttatttttttcaagaatgttccttatcttcattcattaaaaatgttcatttgtactaatttctaagattctttattccactttgttcccaaacatatcttttcaggtttgaccagcctacaaaaataaaaattcttggcttcattttgggttccactcttaaattctctaactatgggaaggtttgatgtcttaacgctcttctatgtttctattatatttttagttgtggagatagagatacagatcaaggtttcatatgttcagttccagattaacagtgttaagtgagggttttttgtgctatgccgagactttaaggaagtaacttatttgttgatgttggatgcagctaatgattttatccttattcaaaggaattgggaatgcccttatgcacgttccagaagttgggccgttgttgtcttcttttctggagcagtactataatgagctcaataagtcttgtccaaagttgtcaaacactgaaactcagataatgtgccttttgctggaggtatgtgtattgtatattttagttttagcttatgggatctttattatgaggtttgatgtgaacttgttcttcttcatgcgtagagctgtgttatgtcatctccctctggtggaaatgatcttcaacatcttttactgaaagctttgcgggtaagatattaagatgtgtgttttacttatgtcatgtcttgttattttgaatttactgacttcattcttgggatctttcagttgggcggcatgacatcagatgaccctgcctgtgtaaagccttgtatcactgtcttgaacaaacttaacaatcaattctatatgaagttgaagaatgaagtgaaggtcttattggcagtatatctatttattttcagagtttgttgttgtcattcatgataattgatgagtatagctaatgatctagttaatgagtttatgataatctgtttcattgtgtaaataaaataattatcaccaatgtagcttttactgtgacctaaactaatagttttttcttatgcctgtcaggagcatctattttgtgagctcgtgattttgtggcataatgataatggtgatgtacaacgtgcaactaaagaggcattaatgtgcatagatgtgagttccttgctcttgatcaaatatcatgtgttctgtgtgcgatttctttagtggttacttgcaaagaacttaatcttttggtattattcaatctggacctttggggttttcatccctttaagaagggtgtttattttattttatttctttttccggggggtggggttgtggatcttggatccttttcccctttactgtggttaatgagctccgtagttttagctttgtgctctctgattctggacaaatcatggcctctctctttctatggcagtatttccatctattcccaatcagaccgtgatggtttctggctgttgaacttggcagccttgtgttctatcctccgttatctgtgtcactgttctgttctgttccttgctttttatttgatagcagatttcactgtgaaacaggtgtttcatcattatctgctgggtgtttagcttcaaattcatcaattgacaaaatggatgatatgtcattattcatcaattgattgtagatttttttaaatgataagataaatgttttcttttaaaaatccttaaacagttaatatggtagtgacctgaggataaattttaacaatgtaaattccattgttatctgaccgaagcctttttggatcaactggttgttttgcactatcaatgttatttgttgtttgttttgcactatgctcttcaatgtccaatctcaccttgtggggtaagaatttgttgttgtttcttttcattgtatgggaggttttttccaactttttattccacggaaggaaaaaaaagaaatgaaattaagaataattggtggatatattggaattgcagattagtttctcaactgttggccacatgcttgatcttatacttgcacagaagagttgtataagtagttcagcagaagaaaagatggtgaagaaacaaaaattcataggacatcaagaagcaggatatcctcctaatgacatattcagaagagttaatgcagtctacatccttagttcccttcttgatgttttgctactgaagaaggacataacaaacaggtgacttggttacttctgaatctgaacattacattatgggtactgctgagatgagtagttaaaacatttaactgtgctaaattctcagtttgattgttgcaggcatttacttttagggcccttatttaagcttcttagcaaggtattttcagaagaatgggtgaatggtgccttttccccgaagataaagttaagccaaccttcaagtccttcggaagccaacaattacacaatatatcatattcaacagactctgttgataatcctggaggatataattatttctcttaaaagcatggatccgttaaatgtatgccttgtgaagctggaaaatttattatgttgttagaaatattattttgactaccttttcactattttagctatttccttatattattaagttttgccattgttgacaggaaaaaatgacaaatgaaattaacattaagctattgatagagtgcgcccggaattccacagttgcagtcacccgcaaccatgtattttctgttctctctgctgttaccagagtctttccaggagaagttttggagcatatgcttgatattctagaagttattggacaagcagctgtcacacaggtttgttaatacagggtttccctgtactgaacttagggcattcttttggtagagtagcttattagatccttttcttccctggggaacaatgttatttgtgtagaatagcttattacatccttttcttatgtttccatgcttgttggaaagttccacaactcctacctcgattactagggcgtggtttttatacttgtcggacaacctcacttaatgccaattagttttaagatgaaatctaacatggtatcaaagcctccagccatttctgtcatttccgagtttcctttgtgcatcacttggtcagcaggcatctgtggaaggggagggggtgtggaaactggaaaatcctacatcacctacctcaattgttggatgaccttacttattaactgttgcaacttaacttttagttgcagtatttaatagaaattcttcacaattcaatttattagggactaataatccagtgtaggaactgtggtgtcatcatttctcttttttgtgtgcctgtagattgacagtcattcgaagcatgtttttgaggatcttatatctgcaattgttccgtgttggctggctaagacagatgatgtggagaaattactgaaggtttgtttttcacataaatgatcttctgctgcttgatacaaaagaatctcttagcagttcaacctactaatatgtttttttttcctccagattttcatgaatatattgcctgaaattgttgagcacagaaggctgtcatttgtgttatatctattaaggtattcttgttctacttctacatcatgatcctgctattgatacttcagccatcggttttttgcctgtgtcttataatgatggctgttttgcagaactttgggtgagggtaaaagcttagcctcattgcttatcctacttttccgttcattaatttcaaggaaagctgcctgtttccttaatgttgagatgcaagatgttttaacattttataatgaggagtgggaatataaatttgcagtgcaaatttgtgaacaatatacaagtacgatttggcttccttctttagtcatactgcttgaacagaggggaaatagtgatgttgaccaggcaatgtttctggaattgtttattgtaatgcaattttctttgcaaaagttgcaagatccagaatttgtgtttaagttgaaatcaggtgaagatacctcagtcattcaggtataaatccatatcagatgcatgctagatacttgtatgctttttaatgtctttattcagttctataaggcaaagtctagatgtaacttatattatgatttttatgaatagcttctatttttgcctgacccatgcccaataatgactagcagatacatacagtatgtttttgagatgttgatatctcttaactcataaatttggggatactatgttgacacccactggctgcaatgtggcgtcaccacccttgctgcttgtgtgcaggctaagggacatggtggaaagctttgataccaattgataagaactttgggagagcaacaccacaaaagctagccgttgtacttagttagagagcccgaggccttataaacctcgctagaattgcatacttctaatgtacaacttgattcccatagcctgcaattggatcctatcattaacatatatcttccctgatttattaattgaaggaggtatgtgtggggtaaaaaaaaaatattgaatgtaagtttaaggggtgtcaatgtaatttgcctgacaaaatagtatgatacacatgatgaagttaaatttctatcaatcagaaattgtgattttaaggtgagggacagatcttacgaagatatcgaagcagaagcagatttcatattatgaactgaaatattcattctttgtagaagaatttatatcatatttgttttccttttctttgtaggtttcatgctgagatgctgtctttggttttagtgtgagtgcaatggcattgatgttgcatgcttcttatatttgtgttaatgttgtgatctttgaataagcctataaacacttgtttttttttagatgaacatatttatcagaaattggacttagggccctaattcaacccgaccaaactggcttgcaaggtgaggactgcccaagcttgataagttctatttaaccacatgtctagttgatgtgggactaaattaccacccttgaggttgcaattaaggcaacccccaaagaggccacaactaaggctaggtgtgactggaatttagacaactatccaacaatattcattatcaaaacctgaactgaaatattctttgtagaatatgtcatattttgttttttctttgtaggtttaatgttgagatgctgtttttggtttcttattgtgatagcaatggcataagtgttgcatgcttatattttttttttgttttgcaaatgttctaatctttgaataagcctatattctcttgtttatttagatgaacatattcataataaaaataaatgtgatcgcttcttgaatatttcagagggcattgggtgcgcttatggagcatgttgttttactcatgcaacttgtagatgcaaggaaaaagcaactgaatttccctgtaattctgaggacagagttgaaagaaactatgcatgcacttgcaaggaatctaacaacagttatgatacctgtcatatactttgagagcataattaaattgcttcgccatgcagacaagaatgttggaaaaaaggtatggtttttaatgaagttacaaaatatgagattttattaggatcttgtattattttgatacaagggtaaagtggtaaactacaatttggtggtgtatttatctgcttcatagtattctattaaacatcctgattttcaagatgtgtacttaatttggtgggtatactgtatacacagtggtcatttattcttttttcatatgatgattgggttttattcacatgttatgaatacagttggttctatatacactgtaaattgtttagttggtattgaccacacatcttggtaaattatttatttgccttttaatatgtgagcatgagcgcacaataagaagccaaaaatactaagggggtgattacttgcacttttgtttcctgttttcattttctgttttcactttttaattacaaaaataccaccttgttttcaatctgtttcctgttttcatttatttgtataggaagcgctaaaaacttttttccccctccatttcctgatttgacaatcggaaacaaattgaaaacaaggtgacatttttgtgactaaagaaaacagacaatagaagtgcaagtaaacgccccaagtttttaatagaaaagaaagtattgatatatcgaaaaacataagagtcttccaatgtttgcacaccatgagcacggtatagaaatccacatcttttttgtggtgtgaaagcaagacagtgagaactgtgatttgatatttgtatttcttgtgctgcaggctcttgggctgttacgtgaggctgcaagaaatcataaaaatgtcagtttaaagcttaaagacaataaaggttcaaggtcaactccaagttttcttttgcttcatatgagtgaaacttctcaagaatcacttaataaattgtgtttagaaattattcgagtacttgatgattcatcaaatacctccttgaaagtggcagcagtttcagcattagaagttctagctgaaagatttccttcgaataattccatctttagtctgtgccttggatctgttacaagacatattgcatctcataacttggctgtgacttctagctgcctcagaacaactgctgccctgatcaatgttctaggtccaaaatcactggcagaacttcccaagattatggacaatgtgatgaagtcatctcgtcaagtattggctagtttggatatgaaacccgaaaccaccgatgttttatcagccttaaatgaatcccatttttatgttctcatcactttggaggcagttgtggacaagcttggtggatttttaaatccgtatcttacaaatataatggagcttctggtgctttatcctgaatgtgtttcaggaatggatgtaaaggtggagtctagagctcatggagtacgaaagcttcttgctgaaaaaattcctgtaagacttgttataatgtagcattgtgtaattgtggtatgaaatgaaatacccatttttttctttaccaatcactatttttttacaggttcgacttgccctgccacctttgttaaaattatacccagctgccattgaggctggggataaaagcttaacaattgtatttgatatgttgggaaccataattggtacaatggacagatcatctattgtggcattccatggaaagatatttgaccattgtttggttgctcttgatctgcgccgtcaaagtcctccttcagttcaaaacattgatgtagtggaaaaaggtgtgcttaacacaatgactgttctaaccttaaaacttactgagagcatgttcaagcctcttctgataaagagtattgagtgggcagaatctgaagtggatgaaactgcatccagcggaagcattgatagggccatatcattctatggcatggtaaataagcttactgagagccatcggtaagtcagtatttagttagctagttattgttcgctttagaaaatgttctttgaaataagcatgctttgaatttagtcaaacaacactttatttgggtttctaaatattttgggtatattttgtattctcagaagaagagtttagctttttgtttgtattaaattatgtacatgtgatgtagatacgaaaattgggttttgaaccactgtaaatatgtcaaccacttgtgacagttgagacttgtacaatttggtcgcagtatttaaatcagtagttagttttcaatttgatttccttaattattttttatgtttatgccaataaacataagaatataatcacttgttatgatgttaccttgtttacccaaaataatgatcaaatcacagcagtttaagatggtctatatccttatttgtaggtcattgtttgttccctacttcaaacacttgcttggtagttgtgttcatcatcttagcgatggtgtagatgtggaagtgtctagagtgaatcggaagaaaaaggccaggattctagatgatggcaatataaaagaaataggcagtgtgtctatcaagggctggcatctcagggctctagtcttgtcatccttacataagtgtttcttgtacgacactgggaccttgaagtttcttgactcctcaaatttccaggcaagtgaattgtttacatactaagaactcattttttcatctattcgtatccgataccataacttttgaatacttcactgatacgcgtctgtgaagcatcaagcctttttaaagatatgaaaatctaatatagtttacatattgagacatagaagcatgtataaaaattgaagcattgtccattgatgcaccaaaatggaaactatcctctttatggatgatctcaaaaaagtaatgagattgatactattttgttggtagattaataggacttgatttacgatgatttatactttttaaataatgtgcaggaagtatgcttttaatttgaatttgcagaattttttttacatgtctagatttatatcttatacctatcctatcctatacatttttagaataattgcagtcatgtcagatacttttcatatctgatatatgtatcgcatgggcatcaatatctatttttaccatttgaaatggttatgaaaaaattctttagaagactttttttccacctagagtggaattttttaaaggttatgcattaattgggaatttttcctttccatttaaaaatactttgcatgttttctcattccattgaggaataaaatattcctaagtctttcagcttccttcagtaatatagttgcttgctatattctctcactgactgttatgtcatgcttgctgcagatgttgttgagacccattgtttcacaacttgttgtagatccaccagctctgttggatgacagcataaatatactaagtgtgaaggaagttgatgacctactggttgtgtgcatcggtcaaatggcagtgactgctagatctgaccttttgtggaaacctttgaatcatgaggtgaactttatgatttcttttcatttttactactcgttaatgattgggcaagtaatttgatactgacatactggtaacttactggcttcactatcttgtttttcattgagggaaaatgcatatgatcattgtcctcgggaaacactgttatgaatatgactggttctactattctccctattagtttgggtgcatggatgccccaagacattttaacaatagattaagaatatgtctaacagtagaagtaattaactctctaaaggccataataaaagtgtaaatacagatatggccccccaaaacttttaatttaacgaatccactcctcttacatgtaaacattcagtcagtagctgtggtgcagcagcaagccaacaagctggacggggcaaatgggctcctagaaatgccagcaggttcaaacgtggagtttctaacattagtcattcaaactagaaaaacgagcaaatccttaccaaaacttcctttgctagacctccatttgtggccttgctaacaactacctatcaacatcacctaagcatagtaaaatcatgtactatttgggaaaactctcaacaagaacttctaagagaataaaataagtaggtaaaatggattgagtttcttaagttgaaattaacgtgaattaaaacaagttttttgagaagctaaatcagaacttctataaaagtttattttaacttatgagagaagcttaattcattttacgctctttttttccttattctgtaagtgcttattgaatagtttatctgaacagggtttcagtcatgttagagttgaccttttctgctatgtttatcgggctttataaggtttaattgtaaatagactgtagcttttatgtcattttgatcaaactttagtaataatgtcaattgacgcctgcggttttgacctaccctaccggccaatgatctttaaagatctgaacttgctcctgtactcttgcatcccatttcatagtacgttagctttggtcctttgtagtcatcaatgccttatttatgtgttgaagtttagtccattagtttgttgttaatagttttgggtattcagtaatatgtgttgctcttgaatgctatatgtttgttccccgcaaatactagtattccttagcaactgaatatctttctgccttctttatcccgttttttgcaggttttgatgcagacacggagtgaaaaattgcgagctaaaatattgggcctcagaattgttaaatattttgtggagaacttgaaagaagaatatctagtgttcatagctgaaacaatccccttccttggcgaactgcttgaggatgtggagctttcagttaaatctcttgctcaggaaattctgcaggaaatggagtctctgagtggggaaagccttcggcaatacctatgatgtaagattaggagggcagtatttatggttgtgacatgagcaaagagctagagatatgtaatcaaacaagaaatataatcgataggccagtgtaaattgtggttaattaaggaaaattagtatttatatataccgataaaggttaaagttcaatttttctggttcaacttttataacactcaatcatttatagcataatgcttttaagaggaatatttgtaataataaagagagaagaaaaagtataaaaataggattaaattgatttattttgaaatttgatattttttttaatatcatactacattcccagagaaatttaatccaagactcttgcagtctcttatattttgaaaagtattctatttttttttttgtatctctttcatttataaaataatggttgataattttggtagctttattagggccgtattaagaatagtggaattaggaagtaagacaatggataagcaatgtacctgcttgcttgtggcattgatgactggtttaaaaattaggtacgtgttgttacattaattatttttttagagaactttaattgttcttttacaaaaagaatctgaaactgataaattgatggaggcaactgtcacatcagtttttttataataatttttaattctatcataaaatcaagtattttaaggatgaaggttttcagtagtcttgaaaaatggttcgtgtatgatcaatgaaaggaattgtgggaaatatattacgtagaaagtggccaggtaaaagtttaaaaaattattcacgttttaacttttgattttcagactataaaaaatgtttatgaaatcaaaacatacactattataagttatatataattcttaaaaaggacggataagacataaaaatataaaaaatatcacaactatattgacatccttattttctaagattttataccaatacccaacggaaatttatatacaaaggaagaaagaaaacaaaatatgggaggattagaccaaggtccatagccaaatcaacaaaactcatagcagctcattaaaattacgggcataacggtgagagcaaaaagggggaactgaaacccagcaaaaataattacgactgagaactgcaaaattagccaactgatctgcagagtagtctccttatctatagacacgtgtagctttaaaactaatatgactggatctataaacacaattgttccatttagtggaaaacttccaaggaacaagattcaggttatattatttataattttatataaaatgtaattttatcgaactaattattaaattataattacatgacgtattttttgtttttttaaaggcaatttatacattattagaacacttagtaacaacacaaggtgtgccaaactaaggccaacataacatattgattagttagttgtttcaatttttttttaatcaaattaaagttggacaattatataatttgttaagtaactctgaaatttagttaccttttagtatgacataatagcttatttaattttgtaacattttgcttaatgtcaaacatagcacagacttactcattacgtttgacagcggagtttatggatggagaatcaaataatggcagtgcactttcatgttacactaagtgcacgctacattaggtgacttatcaaacaataatatgatgaaaatgctataaaattatttattaagtttattttctacattatatatgaattttgtttgttttaaatgtgattttcaaaaactaattgtatataacatttatattatatatgtgattatttcatcctcaataaaatttcaaaaacaaatattagtttaaaaaaaaatataaatatatctatggtcataattgaaagtaaacattaatattttttaagatgaagattctgcaaccatcattttatttatttataataaattagctatcatactgactataagaatctacttgctgattatatattagattaatatttgtattgttcccgctacactactcataccataggcatcatcaaatcctttttaaaataccaagtgggtcaaagttgggcttgtcttccttccaggctgaacccatgctaagctatgaatattaatgaagcttcgtttgataccctgttagaaatcgtgtggagtcttttcaaatgatatatcaataattgctttatgagaatgcatgtggagtacatgtgccattatagaaactgcagaatttactttaatttgttacgggtcacggggtgaattgaattctgcacttgatcagcaacacccatcttccacgcatccaacagttttaaatctttttacatcatctttcttaataatacttttaatcactaaattaaaatattaattttgtacaataaaatattaaatacatttaatttttatttaacattattaacaaaacttattataaaaaaataacattaataattaaaatttagaatataaaatacaaagtatagtcaaaacaactaaagaccgtgctccaccctctttacccaccccctctctctcaactacttttaattttataaagaccgtgctccaccctctttacccaccccctctctctctcaactactactaattttataaagaccgtgctccaccctctttacccacctcctctctctctcaattactttataatagaattttttctatggagaaaattccagagtttcatatatgtttatatcgtaatgaatatcaagcttaacgttatgtgttgttgtgtaggatgacgttgctgttaggaactccaggatcgggcaaaactaccttacttttggctcttgcaggaaacttgaaagcaacctcaaggtagtacaaattctatgcaggattaacattctctacggtcctaaagaactaataattaacattaatttaattatgactaataaatattgtatgtacttattatgtacaggatttttacactgttattaagttacaaactgtcatataaagtaagttagttgatatttacgataactactttataattcataattgattgacaatttaaattttggagttcatggaaattaaactctataaccatcatccgtgtgggttatatacgtgtattactttacaatttgtaattactaatattataggtacctttcggttctttgaaacaaatattaagctattacgtagggcatccttatttagtcaacattttttatttttatagaataggaattgagtaaaaaattgtgcctacatgaatgatcgtcttgttagtgtattccagttatagcacaataacaagtgaaacactgaaaccaatgtgctttaaatcattataccaataggaattaagattgattctatttttatagcctttatctaactggaacaagtccatttctgaattgtcagcataccaagaattttgatacgccatagcattcttcaaaattccattgtcatcatagaattacattagaactttgatccttaaatacctgtgcagaaaagtggtagtataacatacaatggccatgagcaaaacgagttctgtattcaaagggcttttgcatacactagccaaactgataatcacatatcagaactgacagtgagacaaacttttgattttgcaaacagatgccaaggttcaagtgatatagatatgtatataatatattagtttccttatgtgccatttttagttatttttattttccatttcagaattcagttacttaatttcctggtctaatgtcatgaacagaaattgtgaaaaatcttgaacgcttggagaaggagaaaaacatactgccaagtccagaaattgatgcattcatgaaggttgtttcatcttgtaaataatatctgaaaaatcatgcatatgtgcaagttaagagaagtcctctaatttgtgtttttttaaactgattttactcctcaacagaacacttgttggtggcaaaaaccacaatgttaagacagattatgttttgaaagtgccttggtcttgatgtatgttcagatacggttgtgggcaatgatatgctaaggggggtctctgttggcaaaaaaatgagagttacaacaggtgatctctctcccctttctaggaatttgttacaattttctttgaaatttggctcttgtagtgatatatgcttaagttaatctaactggattacctcttgtatcatacaaagaaagagggtccaaattcagtccctttatttttttcttgttttgtgaaatatagctttgataagatttaaggagatttcatttagaattttgtttttgactcctaagattggaaattaatatataataatagagaagctaacacagtccatacatttgaatccatatttgttctaggaacaataatttatagatgatacaaaattcaatccatatttgttttgactgtgtctataccagaagattaagacattatgaaggcactaattgaagttaaaaattgtagcaagcaatgacatacttttgcctttcatatttttttctccaagagaaatgattgttggaccacgaaaagctctatttatggatgctactgttctgatagctctaccacatcccaagtagtgtaatgcataggaaattttgttcaccaaatggatgctactgttctaatggctctacttcaacctgcaccataaacatttgagctctttgatgatcttctgcttctgtcagaggggtacgttgaatatcaaggccccataggagacgtgctggagttttttgaatcatttggcttcaaacttccatcctgcaagggagttgcagattttcttcaagaggtatttgtagatttttgctcctctaatggttaaactcaaatgcttgatgaaattattgcttaaaaacatgttattttcccgtgtcaggtaacctctcaaaaagatcaagctcaatactgggctgattcttcaaagccatataaatttatttcagtgccggagattgcataagcctttaaaaattccagatttggaaagtcaatagaatccatgtgtactgctccctttgataaattaaagagtcatccttcagctttgcccagaactagatttgctgtgccaaaatgggagctctttaaggcgtgtttctcgcgcgagagaccttgatcaacaggcataagtttctctatatttttaggacctgccaggtatgtatatatactcaagtaaataaggatgcacttgtttctatatatagttttcaattcttaagttttttacaagtagaattcatgataagttgacaaaaaaattaaaaaatagcagtttaaaaaaaaaattacaagaatatgacagtttcaaaagtattttcaaatctattgcagtgttcaaacacgccccagccaggcgtgattcaggtccattcgcgccctccccagacgtgtttggtcacgtctccaccaggcgggataggtgaggcagtcacgccccacccaggcgtgatcttgctaagcgtgattcttcactggatggcgtggggattccgtatgtcattcggcgagaaaatggtgttcttcttggggaaacccggggtggcgctggacgacaagtttcttctgggaaaagcttttctgggattctttcccactgctacgatggtgttttttcagggcgtttttgcggggatcactttgatcttgatagctggggcgttgctcgggaggatgaactttcgtgggtggatgctgtttgtgccgctttggcttactttttcgtacaccgtcactgcctttagcatttggtgccccgatggctggttagcaaagcttggggttattgatttctctggcggatatgttattcacctctcctccggagttgctggtttcactgcagcttattgggtcattcacttttctctaacttatcacttttacccaaaaattcatttaaataactagtcgtatgtcttagttactcatttataatcaaaattatgaataaacacttaaatcattgttttttaaaagcaaactcttagtataaaaattcataattgtgtttaagttaacaaataaattttgtgatatattttttaaattcttacaccaacatgttaatctaaataaaattagactcaatgtttttatgtaaaatttcattatgatgtataaaagaattaagagtaaagaccctacaataattggttctttgtctagttaattgtatccaattaatgactaatgttaattatttaaattttttacaaagattaatcgttcataaagttaataaatattctattgtatcaataacttaaaaaagaatcttatattacaatttaaagaatctcattaatattgtaattttttaaaattttttaaaaattattactaaaataaaactcaaacaaacagccttgaaaatgcagatcttgttaactatatgcactataattatcataattgaaaggtatataataattattttgggttatacatatacaacacctaattaaaatatatgtaaaaatatatccacgcatcatatcgcataaagaagaaaaaaaaagattttttcatgtttcaactaaaatataaataatgtgggtgatattgtttttaaaaaaaaaatgaatgattatggtacgtaatattaccaaacaacttttgaaataaaatttaatttcactcttaattttatttatatgtacaaatatacaatgaatattcaagagaaaggattacaaacattgttgtgtgaataatttgaagccgttaattttctttataataaaatgctgacatttgcattgtgatggtgtttgatttgaataggtgggtccacgatctgaaaaggacagaaatatttccatcaaacaacatgattatggtgcttgcaggcgcaggcctgctttggatgggttggagtgggttcaacggtggaggtccgttcgtggcgagcacggtggcatctctggccgtccttaacacacacgtgtgtgctgctgctagcatcatcgtcggggtcctactcgacactttctactttgaaaagctttccccataagaaacttgtcttccagcgccaccccgggttttcccaagaagaacaccattttctcgccgaatgacacaagatcacgcttgggtggggcgtgactgcctcacctatcccaactggtggagacgtgaccaaacacgtctgggaagggcgtgaatggacctgaatcacgcctggctggggcgtgtttgaacacgtccagccaggacgtgattgactacaatagatttcaaaatacttttgaaactgtcgtattcttgtaattttttatttaaactgctattttttaatttttttgccatgataagttagcctaatgttggtgatttcttggtaccacttacagaatatttgttggaattgtcacatgcacaatgtttgtgcaaacaaaatttcatggtaaggatgaggaatatggtaatatctatcaatctgcactatttttcagattcatacacatgatgtttaatggccattttgaattgtcactcatgatagcatgtcttttacaaacaaaaaggtaatttatttgatcctgggcgggcatggtctttggccacttggattcttggtgtaccttattcccttgttgaagctgttatatggtcttgtgttgtatactatagcttcaacaagggaataaggtacaccaagaatacaagtggccaaagagcatgcctgtccaggataaaataaattgcctctctgtttgtaaaagacacgctatcatgagtgacaattcagaatgaccattaaacatcatgtgtatgagtccgaaaattagtgcagattgatagagattgccatattcctcatccttaccatgaaattttgtttgcacaaacattgtgcatgtgacaattccaacaaattttactgacaactattctgtaagtggtaccaagaaatcacaaacattaggctaacttatcatgaattctacttgtaaaaaaacttaagaattgaaaactatatatagaaacaagtgcatccttatttacttgagtatatatacatacctggcaggtcctaaaaatatagagaaacttatgcctgttgatcaaggtctctcgcgcgagaaacacgccttaaagagctcccattttggcacaacaaatctagttctgggcaaagctgaaggatgactctttaatttattaaagggagcagtacacatggattctaccgactttccaaatctggaatttttaaaggcttatgcaatctccggcactgaaataaatttatatggctttgaagaatcagcccagtattgagcttgatcttttttagaggtcacctgacacgggaaaataacatgtttttaagcaataatttcataaagcatttgagtttaaccattagaggaacaaaaatctacaaatacctcttgaagaatatattaaaaacgaataccaaagacaaaggacattaatgattgacattgaatattaaagttatcgatgaggaagatttaaaaatttgtaataagagttgaaacttgtaaacactcacatatcctcttgtctcatcgtgacacttgtggatcaatgaattattacaatactctcaaacattttaatttcagcactttatcttattcattttatcgttttcttttacatttgttatacttccctttaaatcttcatcttttttcaatctcaatttcttctccaaactttttactcctttaattttctgtatctttttttttgcgcactttattttcgtcaatactcttttattttaaagttcttctatgatcaatttgcactttactctttattacatacttttagtttgttctcatgttaaaaatttaacattaacctatggtacagtacctattgaggaagatacaagactttcagagaaaatgtttatcctttttctcaaatatctatgggattgtgtcgactaaaacaagcacaaaatttcacggtcaaaatactataaactatttcaaatctttttaaacttgcagcaatcgttttactattaactaactaaaatcataatgcgttaatcattttttaagggtatttgttacactgcacaatcttgaatatcttcccggcgggatacaccccaaaatcaaaagttatcatgcaaggatatgtttggtgtgtcttacgaaattcgattatatacatcacgaataactatgtcggttgattctcaacaaaaacatcattcagcatcttaactgggtaattgtcttcaatctgtttaatgctaaagcttctttaatctaactcatacaattatttgtatatgcatgacatgtgggaaatcaaagtaaatatgacttaaacgagagtgtgtgtcacaatttcaagatgacaggcctctggccatggccctcaggacatatatattcacctttctagaaattgctaatgttctaagtaaaattcagacttccaaatcaattcctcagtgctgattgtaagcattacgactattactatcaatttgtgagctaatgactgctcatagaaccatctgtaatctgttgaattgatcagttctgccttctagttgacacttgagcgagggcttgatcgatttaagccattttaaattttactggccatttccacgattttgtcaataaattcatattcgtacctacaaaaatacaaggccttttagttcattcatacacaattttcattttctttctaaaattatcaaagtaaatccgcacaaaagtaattaccacacaacaacaaaaacagaattgcaaactctaaacaaagccttaactccgtaccccaatgtctctcacaacgttattccttgttaacaaagtcaaatttaaatgaacggatttcaaattaaacggttcatagaatttcaagaacgatgcacatattaagtgattattatcatcaactattactagtataatagacatgaatcatgaaaataagcaaaaagtaaaagaataatatgtgttgtacccggttttcaagtaaaatcctttcaagttggcgacatcaaacaaagctgacctccatttcttcaccctctcagagtccttacccaacatattttcatgctcagtcatggcttcaccatagctatttctttgatgccttaaatccgacggtaacactttgtaaaagatgggacaaatcagttggtttttcgtctccatacactgaaggatggtcaaaagcacatcaagacaggacgaggaacgtgcatagttttcagaaaatacaatgatcgaaagccttgattcttcaataactccattagtagattgtgaaatttggtccccatcattcatgaaggtttggtacctactccggcacaatgcattgttcagaaaacctgtaaaggagcgggtatcgtttccactaaaactcagaaaaatgctatagcggggtacaatggcgatggcttctcgcacaatgttttcgatgaattcatattcatattggtacctacaaaaaagtacatgaccttttaattcattcatgcactggttacgtttttctttatctattattgattactttaagacgggttcaagcaagaaactctctcacacacttgcacatttcttacaattaattaaaaattatgaatgaaaattattaagtaaaaagtgagatctataaattttataattttaataaagagtgcttaaaagaattttttttaatataataaaattgagtttgaataattaatctccccaaagatttcaaaccttaaaactcgtaagtcaaaacaaagtaaaattaacttgataaattagctaaaagcttagattgtttcttaccaataataaattctagtgtgataattcataaaacaaattccttatcaaagagtataattattgttggtttctattttgtttttcttttaagaatgaaaggagaattaactagttacgttagattgtcactttaagaatattggccaaagccttgcaattctagacataaactggctcaagcccatgttaacgagtcatttgacaactcagaagttagaatattcaataaggtataaatcaaggaaaaaagcttcgtgcaaatatcacaagtggttttggtctttgaggattaaaatgcaagtttacatgacttcagcaataataatcggcatgagttacttaacttagtatatgaaattttaatttcaacaatgatacataaacaccatcctaggctaaaaattcattggatcgaaacattttatttttaacttaaatatctttttaattcttataatttaatatttatttttttgtttttataaaattattttttgttttaatccttacaaacaatgtttatttttattttggttcttataggacttttttttttactatctagagtactatttaaagtaattttaaaactaaaagtaaaatatatatatatataatttataaagactaaaaataacaaaaattacaaaaattaaaaaaaaaacactaaactattaaaaacatatttacacctatatttttcattatctctcttattaatgtcacgttgttctgtgtttcttttttctctcaaagtgtaaggcagtattgaatgcctacaaaaaattattattttcattttctttttttaaaattaagaagcggtactagctaaattaagaagaagaaaaaacgccatacctgcagcttccgtctccgaaacaccatccggccaaggtggcaacttcatacaaagctgacttccacttgtgtattttctcggagtcctttcccaagcgactttcatgtctaatcaggtactctccgaaactaccagtctgtttccttacatgggagggatccacgtggtaaaagattggaataactagttgcttctttgttgcccttaactcaaggatcttgacaagttcttcaaggcaccacgaggaagacgcgaagcttttggagagaacaacgattgaaatcctggatgcttccaatgcttgaacaatagcttcaaagatttggtcaccacccttcaacccaacatcgaagaatgtcctcaatctcgccttccgcaaagcagcatagagattacctgtgaaggtgtggcgcgtgtcttcccctctaaaacacagaaatacatcgtagcgccacttcgcaattcccccttcatccgccatcgcaatgaaactattaagcagataacataagatattatatgatgtgctgacactatcatttacgcgcttttgcttaatttccttgctgcttcctggaaataaaatacatggatggagtccttgttttcttctccattttctattcgaaaattatagttgtcccactcaaatttgtgcatttcatcaccacttgaaaaaaaatattatttccttaatctaattataattgtcacaagaaaaaaatatcaaaataattattttattattattttaaggtaatattaattatctttttttatttatatctcttatgagattaataatagacaataaaatttataaataaattaatgatgatataaaattatcattctttttcaactatttatatataacaacctaaaaatacaattataacagaatgcagaaattatattgtatgtataaatatagttgattttactgtgactaaaaattatttactattagatatagttaattgcatgcaaaaatataattaactttacatcacaactattaattaactttgtatcacaagcaattaataatacgatgaaatcattaaaatatataataataagtaaccacatcaaataaaataattagtttcaacctaaattctaattaattacaaacttacacaatattttcgccaaatagagagaaaaaaaatataattgtctaaatgtggatccaattactttgaacatatagaaattattaattgtatattctattcaaaataaaaataaagtgcaagagtcatagctcaaaatgaacctccaataacagaaatccataagcattttttttcatgcactagacaaatttcttcatacacccaccaaagacaacgaaaaataaaaaatattcttccataagattcatacggattgacaatccgtaaggttcatacaaattgaaaaatccgtaagaatcttatggattgcaaattcgtaaaatcttatggattacagatcgcctcatcgacctcgtcgatgctgtcgatggcgagatcgaggtggggattgtggtcgaggatagagagggggatgccgagggagtgggccttctcttccatgcggttagaggtggggaccccgacgatgtcggtgagttggccaaaggctgggagggcactgagcttgacgacaacaaaggatacggattggccaatatgtatgaaccttatggaagggtattttcagtttttcgttttattgttgggtgtatgggaacactagctggtgtaggaagaaaaatccaatccaaaattgggacaaaatgtaggacctaaccaaataatggtttgaacatacttgtgatgatatttgtgataccaaggtgaataatgaagagattaaatattctagaaatacctaaactagaaaaaaaaattatgtatcacattgttcataggctccttgttatacaaaaataaggaaaaagatattgtacacaaccttactcttgcatatgtaaataaactttttacatattcgaactcatgaccaacaaatcactaaagcataactatactaagattaaaaaaattaattaaggattaaaaactaaatttttttaaaggacttaaattaaataaaacaaatttatattgactaaaattgaaagatgataattttttaggaactaaaatttaaatttcaaaaatttctaaagacatagaaaacatgataccatgtgactaaacatgttagtatcacccacatcggtgtcacatgattacatcatgtgtgttgtgacatgtaattttgttggacatataagtatttgatagtttttatttaacgtgggagactaaacttacttcaaaaaatagagactaaaattggataaagaagattgagagaattaaaaatggaattctgaaatagatgaatgatgaaaacttatttaaccttaccatagattttgtatactctgtttttatttttgtgagtagaaggcgatgtgtttaaattttgtttcacggtgccttacctaatgccaatatgacaaaacaaaatagtaccacttgttttttttatctaatcaacacaaaacattgaaacaagatgtagaaaaaacacaacagacctcgagaattgaacaagatttagaaggaatacaataaaccttaggaattgaactggatgtaaaaacaacattgataggcacaactgaattcaagggcagttattgatgttacaatcaattagtcacacagctccacagcatatacttgaccgactttcactcattcttcctcgtagctgtcattggataaaaggaaaggatttgctatatgcttgctaccttcaagtttaatgaccttttgtacaatcctttcgataaattcatgttggtacctacaaaagtgcaaggtcttttaagacattcatccgctgtgttcactttatttctcctaatcagactttatgtcaataaaacaacaatattaagctcgactaattaatcttctcactaacagattgccgtacaaaatacaaaaactgctccaaacaaaacaacacacaataccccatgtctcggacaagaactatgccatgtttagcatttcatagatggtcaatatcacttaagagggaagcatatattaagtaactaattaaaagcattacgtactcattttctttgacatggtctccttccaaattgttgatttcagacaaagcagaactccatttctgcaccttctcagagtcctttccaaatcttttttcatgttcagtcatggcttcaccataactttttgtttgattgcatacatccgacttttgcacattgtaaaatattggccaaaccatttgattgttggtcttcatacactcaatgatcttggcaagttcatcaagacaccacgtggaatatgcatagttttcagaaagcacaacaattgaaatccttgaactttcaattgctcccataagcttctgtgatatttggttcccactctccaattcctcatcgtccatgaagattttgaatccctctcggcgaaaggcattatagagaaaacctgtgaaagtatagcgggtatcctctccggtaaaactcagaaaaacatcatatccgggcaaggcttgcacggctgattccacgatcctttcgatgaattcatattcatactggtacctcctataaaagcacaagtctttttaattcaccaggggtattcgagcatggacaaccatattgtttctattaatcagaattataagttgacttaagcttgactaatctatatgtatgcacagaacagattgctactgctacactgaaactggaaacagaacctttaatttacagcacacatgtatttctctcggttaaacaaaacaaagtgactttctaaaacgataattagaagatcagacatactgttcagcagattacagatacaataagtaataaagaagtggtgccatgctatgctagcagttgtagagattaataatggaacttaatcaactaaaattaagcatacccagtttggtaacaccatccattcaagttggtgacttcaaataaagctgctctccattgcttcaccctctcattggaatctctaaatatttcttctaatttagacatagatgctccatagttaccgccctggtgccttacttgccacggatacactccgtaaaagatgggccacaccagttggtttatcgtcctgttacactcaaggatggccacaagttcatcaagacatcttgaggaggatgcatagttttccgagaaaacaaccatcgaaatccttgattccttgattgcttcaagagtagagtgtggaatttggctgtcatgagtgtgtagtttacgatcatattcatgttctgtgaaaaaggtcttgattctcttgctgcgcaaagcattatagagagtaccagtgaaggtgtaacgggaatcttcgccatgaaaactgagaaaaacatcgtagtttttgagttcattcgacatgatggatgagaagtagcagaaggtggcttgcttgtctcgttgactcctcctaatggccaatgcctccctacttctctttctctctttcataaatttaaaatattaacacgatgccctacgcggttttgcttaatttccttgctgcgccccacttcaatgtcaagctgaaataaaatacatgaacatgggttgactggaccagatggatggatggagtttttgttttcttctccattttcttatcaacaaaccagtcatgtcattactatcatctccatttaaaagaaaatacacaaaatttgtaaaaaatattatcaatgacaagatttgtaattaagtatttaatctaaacccttaatttaatttaatagttgtaataattaagttcttatttataatagttgtaataaacagaaatccaaaagtttttttttttcaaaccaaaaaagctcccgttgatagttcttgtttctcataaataattgaaattatgtccatatccttttattgttgtcttaattccaaaacgcagtctaagcaacgggagaacactcaagtttcttccacgcctatacaatgcaacggaataagtacgactgtacgagaccataaactcggcccatttccacaaaacatttgatctgacatttctatagacttcattggggtctctaactaacagggggcaaagacaccattttggtgctagtttttttcctgtaaacgattcagattttgaagtacaactattatgaatatctccaaataatatttaataccgtgtttggtacacacaaggatgtcctttagtcccattttttttagttaaaataaataaaagcagtaaattgattctatgtatacgtttcttgaaagagatgacagaaaaaaattgggagatcaaaattttttgttaacagaactcctaaaatgtttcaggaattgctctcttttcaccagtttttgctgtcacaaaatgtccagctgaattacgcatatcctatgagtgcatggaatttaacaatttcaaagccagagcttcttgctcctccaacgtaaccgcaccggtagttatacctgcattccctgaaacttcatttctttcaccctcatcactgtcactatcaaagtatattttactctttttatgccgtctatctacagtctcatctacttctgacccagatatatcatcttggtcgtcctcttccgcattcccagccttccatttcaacttctgcttgattcttttttctctaagccgctgacgctctataagcttgtcttccttgtcagccttcttcaaatcatctcgcatccttctatagtattcagctttttgttctgcatcaagacataaagatgatgtggcaaaatgtacaaatagtccatgcttatgaagtaagaacatacatgtaagttagctacttcaatgctctgaagaccaaaatggtatatagtgatctgatgagaatgagatctagccaggttctcaaattcaatgatgattgcagaaaatacaaaagggttttctaattggtaaacaagtgtgtagctataatttaacattttaaaacattttttattattttcacaaaactatgaaaacaaggaacgaaatgacacgtatacacatgtacaagcaacaatttcaccttcagcttcagtttgcagttgaaaagtatggaatacctggatcgagcagcatttctttgccactttgtgtgtcagctatcctggctagtggaggaagtgtgtggccgtcatcatcaaatacaaccctagtcccaagtggcctgtgtacattaatcttgagtttctttttcttcaatacacgagttgctggtctgcataggaaagaactaaattggtaagaataataatggaggaagaaattcaaagctccagatgaatggctccagccaagaaatatgaaagatccaactttatacccaacactaagtttgaattttttttctattagccacatcataaggtgttatattcaaatatcaatttgtctcagcaattttgaaaccagaagactagtgtagccccttgccataatcatatataaaaaaactaatgcagcattatcagaaagcagcctaattttttaatctgtaccactgtaaaaatgtatatgggaacgtacattatttcttcaatttcagatgacttaatttcaccttcatttgcagtatccgctaactgaagaatatcattttcggtttcctcatccttgaaagcaactgtgtctagcttcttcctggaaacctcaaagatagtttccttgtctgaatcctctggctcaactaaagttgatttagttgtcacatctttagatttaattttctggtttagaaaacggattttgggggtcattggtaaacctaatgatgctgaatactcgtcaataggtagtttcataacatcaaatatgtctttatccttttggatatggatggatctcaaatatgtgatgaatgccctctgagcccgatgctgcatgtctgggtatttggccagtaaagatgccaacaaactagaaactggttgcagtagttcttgccttggctgaataatcaacaattgcaaaaacatggaaagcaaatgtcagacaaacataagactgaagtgaagcagatttaaaagtgacaccttgatgttcaaatgaaaattggaattgcatgcatactattaatttgcagggaaaatgtaccttattaaaatgcactggaacctttgctgcttttaacttttccagcatttgaatttctgaaggcaacagaaataaaactgactttccatcagatttatatcgagcagtacgaccaactctatgtatgtaagaagctacattttcaggacaatccacctacaaatgcaagagagaagtgagagactgaacataaaaacaagctttttgcttccaacaccccaccacaaagccctaaaacttgctccaagacaggaaaccaaaagcaggatgagactcacctgaacaacccagtcaactgccttattaaaatcaaggcctcttgcggccacatcagttgagaagagaacagagcgcttctcacaaaactcagaatatattgccattcttctttcctgtttcatcctcccgtgaaggcacttcaatggtatgccagggtgcagtttcttaaatgcttcaaagacaaattttacctattaagcagggatgtgaacattatggaagatagtcaagctcaaaagagggaatttgcaccaaaaaccacatcttaaacattttccctgtttacatgaaagaattatggaaaaattcatcctaaaaatcctttaaaaattttctcattacaataaccataaccagcgcaactgaaaaccataacagaagttctacgcatgtgaacttcatcatgtagctacaaataaaacaaaacaattatttacttggccattgaatatgaaactaatgagacaactttcaagtttcaatcataaaatcaaactacattccctccaattgcacaaaaaatcttgaaaatgatgactagccaatagccatgcattggctaagcatcaaagggtgcaacttttcaagtggcatgacagtaaaattgtaatagaaacctataacatacaattcccttcaacaagaaaaagaatttcttgaaacaggacagaaaaggggagttggagttacctgcttacagcttgaaagaaagacaagtgttttcgactgtagatgtgtctttatgaaactccacaacatatctaacttattttccaggggaacaatcatcacaatttgcttcaacagagtaggagtggaagtcacagattcttcgtgcacactcagatactctggatccttcaaacttagtcttgcaagatcttgaattgactttgtttgagttgcagagaaaagcaaggtttgtctacgctttggtagttgggaaattattgcatttagttccttcttgaacccactgtctagaatccgatcagcctcatctagtaccaaaacctatatccgggaagtccacccaaccatcagctatattgatcaaatctaatgatacatatctgttttctggtttgacccaaataaacacgtactttggaagacaaaataaaaaatttatgctttacaagggcctaaagcatataaaaattaaacggcacctatactctgcttcaaccactgttgctaaatcacctaggcatggaagcaaatttttctgaaggttgttaaggatagaaaatcttgacatacccaagtacaattaaaaacagacacgaggaaacagatagtgatataaaacaaacaacttaattgtaactctaatttcagagtcagattgaggttaatctatcacatataagaaaaaaagttatattaacctgcgtctgtgaacaatcaaaattgggagtttcatccatgtgttgcagcagtctaccgggcgtgcaaatcaatatgttgagctcatttacacgttctttctccatgtcaacgtcctttcgaccaccaatgagaaggccagcactaaaattatggtgtttgccaacaaccttcaacacatcaaataactgaccagccaattctcttgtaggcgatatgatgatgctgccaacaccatcttcaggtccccatctctctctatacaacttttccaacacctatcattcaaaattcaccataaacaaataacaataagcacaaatactacaattcaatataccatctattcacccactacatattaaatcaatgaccttgcccaaacacgtatcagcttctcatggctttgaactttcgatgttgattttccacacttattagtaaaatgttatgattatattattatcataatatttgcattcagaaaccacgataaacaaataataacaagcataaacatcacaattcaatatatcatattctatttactatatattttctcactttgagctaatcttgtgattatattattatcataatatttgtattagttaaataaaaagaaatacaggggaccctaatccgaagagaatggagctgagaaatgaagcacttacagggataatgaaagcgagggttttaccggagccagttttggcggcgccgaggatgtcgcggccacagagcgcgtggggaagagacgctctctggatgtcggtcatggccacgaacttggactctcttagggcgtccttggttttcttcgagagtggaaattgatcaaagcgtgacgcgccggcgtagcgcgagtaggtgttatcttcgaggcggccaacgggggagtttttggggagacgcggcagcgacattgggttcgaaccggagtccggtggctgaaactggatccatgaattcaagaggcttatctcttcctcctctgaaactcgctgttgcttgcgaaactccttcgatttcggccttctcattgctgtagcttgaaaacgaaggtgaaggtgaagatgaaaaggaaagttggggctaggtttatggtttgtgtgttgcgtgttgttgcggcagaaagagtttgcagtgcaggaattgttggcggttaagcttcatttttgtgaacgacgatgagctacgtaatgggccgagtgatgaatgattgggctggtccgattaatccattgccattatttttgtacacatttttattttcctccatactagggaaaaactttatacacccagcaaaagactaatacataagattcttatggattcgtgaatccgtatgaaccttacgtaagtaagttttttttttaagttaaaaaatatttttccaaataatgacacatgtaagtttcgaacctttaaccttcaagttattaacacgacgcttcaaccaaatgagctaatagatcaattatactaaaagctaattaatgttgatacatataacattaaattttttaatatatatttaatacacgtataagtttacataataaattttgtaacaattaattttgatataataattaaagtattttttacatataaaaatcatagatttaaataaaaatcataagtttaataaaaatttgcaagtttaataaactataaatacagatataatttttaatttaacctgtaaatacaaatataatttttattagtcctgcaaatttttattaaaattatgatttttatttaaaactatgatttttatatgtaaaaaatactttaattattaaatcaaaattaattgttacaaaatttattatgtaaacttatacgtgtattaaatatacattaaaaaatttagtgttacatgtataacattaattggtttttagcataattggcctattagctcagttggttggagcgttacgttaataagagacctacatgcgccattgttttaaattatttggaaaaatatattttaacttaaaaaaaaacttacttacggattggacaatccgtatgggccatacggatacaaatggtacttcgaacttggaacgagtatgaataaattaacgatacttctttaccttttgagttgttctgccagatcggtcgctcaagacctttggtctctacccagacctgatgaaaaaaatgggatcacatcttatggactcgttgagaataattctgatctagttcatggcctattagaagtagaaggcgctctggtgggatcctcacgtacagaaaaagattgcagtgagtttgataaggatcgagtgacattgtttcttcggtccgaaccaaggaatcccttaaatatgattcaaaatggatcttattctatcgttgatcagagatttctctatgaaaaatatgaatcggagtttgaagaaggggagggagtcctcgacccacaacagatagaggaggattttttcaatcacattgtttgggctcctagaatatggcgcccttggggctttctatttgattgtattgaaaggcccaatgaattgggatttccctattgggccaggtcattttgggacaagcggatcatttatgatgaagagcatgagcttcaagagaatgattcagagttcttgcagggtggaaccatgcagtactagacacgagatagatcttccaaagaacagggttttttttgaataagccaattcatttgggaccccgcagattccgtatggcccatacggattgtccaatccgtataactcaaaaaaaattatggattcgcaaatccgtaagaatcttacagattcacgaatccgtatgtatgaagtgtaataaaagtgagggtatttttggaaatacactgttctggaatggtgtattagtctttttctgggtgtataaagtttttccctccatactattgtgattatggatatgattcgccttatgtttcatacatgtctagaacttgtgaggttgaacacaacactccaattaaactaataaactaattatattaaaaatagttaatattgatatataacattaaatttttaatattatatataattttacataataaattttataataataaattttaatttaataattaaactataaattaattgtgttactcatataattttgataataattattagtggatgaaataaaagacaacaagaagaatcaacaagtatctaacaaaggtagctgaagcggacacaactctcatacttgacaaagagatgaagaagaaatttcatgtttagccaaaaccaatcagcatattgatgggctttctctataagtaatttgaattgtactgaattagaaaatatttaaaatggatccaatgataaaataacaaaatcataatattagatcacataaactttatctctaaaatggatttaactgggttacaaattacaacaccgacaacagcgtttaccaaatttaggattaatttcggagtttgttttatttctttttcagtacaaagctattcattaaaaaaataaatgaggtaaaaaaacaaaacattgtcgatcagtcttgaataaactagaaagtgatatataaagtagaggttaactaaatttttaattcttaaattttagtttttaactctgaataaaagtgatatatagagtagcaggtagtgtgaaataggaatatatgtattgatcttgtgatactcttcgagtatgttccgttattatctatgtatgttgttttttcgagtttgatgtgggtacaccttgtgctctattccagtctttctattaatggagtatctttgcctagcaaaaaaaatgaataatattggtctcaactctcaactcatgcaaagtgtattcaaatgtgaaaaaacacacattgcataagatgtcttggcataaatggatattaatgagtagattaacatccgatccaagtgaggttataaatgaccaattttgtatgagtagggttaggtaagacattagagagttttttttttatgtaaacactctggttgcatgagtgatacatatataagttgcatgagtgatacatatataagaacgtagttttgattgaaaatgatacataagttattataaatcttttatacatattttttaattttcgtaaataaaaaagataaataaaatacttgcaatataagtttagctagcatactttacgtatgttattctttttttaaaatgtccatagtattattctttgctattattaattaaccaatttaaattagccataacagtacaagatttgaacattattcaaacccttcactaattattttactccaatcaatttttatttttacttactttgttcaataacttttttactagtactgaatttcaattatttaattctaatattgaaacttcattataagtactcatgattgaagtcatgaacttgagtgctaagaataaaaaaaaacattagaattaggtgttttgaactgttctattaaggtctaaaaagtattgtaactaaaaatttaagtaaatagaattttatataatttaaaatatagtatatatttcttcaattaactttattttgatatattgtttataatataagcaaaatatctacttagtatcattattaatattgagtttgtttttaaattaacaacaaaataataactactataatataatcaactttgcatatttatatgacaagtaacaaactctcaattttttaaaccaactatgtttatttaagcaaatagtttattttcacactaatgatataataaatgctagatagtgtgaaaattaaatttttatttgtttttatatgataatttaaaagctttttgttacaaaattacaataaatgactacaaacaactatactaacatgtttgttaaaaaaaaaatatgttagttaaaattttaataaagataacaatgaaattaccttatcataattatacatcttttaaatttttagttcttggtctttatattggtatatatataaaaagtatttctctgagttcaaatataatataaaagttcccccaaatcagaaaaaaaaaaaataaaaaataaaagttacccagtatctacttccacactccaatatacaagcatgtatagtatttatatttatattgaatacttctaggtctgattctttgaattttaaaataatttataacaattaaaattaatgaagtgcattgaatctgcattggaagatttccctttgtttgatttatgctaaatgagtatacttaaaaagaaaattgccttctagaaagggaccaaaacaaaccatcatacaatagggccgaatgaacaaaatacggaatggaaaacaaacatattaaatacctaatgaacccacaatggagaaagagaagaaagaatggcgtccgaaagggagtcgtttgcaagggcttccaatgccgaatggatggaagaagatgaggaggagcttcaaatggctgcattgctgaggttgccgacgcagaagtgtgccaacatggcgccgtctttggatatgagcaacagaggtgactcagggaagaagaaggccaaggttttggagcagattgatgtgaggaagctaagccgcttgaacgcctcgtcaaggatgctttggcaaccaatgaacaagacaattacaagctcctctctgccatcaaggaatgctaagagagttaaatatttttacaaaaaaaaataacaattctcatatcgattacatgcatgagggtttatatatgattttgcatttaaattatttgtgtggttgactgcaaaagggttggattggatgtaccaagtatcgaagtgagatactgaaacttgacaattggagctgatgttcatataggttcaagatctctgccaactttgattaattacatgcgagatgtctttgaagttcatacatattactcactctcatactaacttactaattaatcaaattaatttttagtaaaaatattgattatgggttatgtgtaataacattagttcaataatattgtccgtactctagctcaataattcattacgttttcttatagataattaatatagccctggatctcccgccattgctctttatatgtttttgacatgtttggatcaacttctctagaagtatttctaaaagaaaaaaatgagacgatttttttataaacaaaaataacttcttcattagttaatttttaaaagctcaccaataggtcgaccttaaagacattccttgaccatcttgaataatatcagcggtgttgtcaaactataatattcttctgttattttacattacttattgagtaaactatcaatttgatccttgaaatactactctctccttaatggttgataaaataagaaaaactaagtaatctcttaaatattgaaagacttttcaaattaagccttaaactttattgaaatgcatcaacttaagaactaattaaactgatgaatatcctatacttcaaggattgcttgaacaattttattactttagggacaattaaggagaggataatagtttgggaacaaaattggtgatttattaaattccattcataattgatatttacgatatgaaatgcaaaagtatgtcattgcttgctacaatttttaacttcaattagtgcctttgttcaaagctatatttcatattacaagtggaaataattaacttcatcttaaaaacagaagaaaaaaaaatagagggactgaatttggaccctctttctttgtatgatacactaaagaggtaattcagttagattaacataagcacatatcactacaagagccaaatttcaaagaaaattgtaacaaattcctagaaaggggagagagatcacctgtcgtaactctccaatcttaggagtcaaaaacaaaattctaaatgaaatctccttaaatcctatcaaagctatatttcacattaacttcatcttaaaaaaacagaaggaaaaaaatagagagactgaatttggaccctctttctttgtatgatacactaaagaggtaatccagttagattaacttgagcacatatcactacaagagccaaatttcaaagaaaattgtaacaaattcctagaaaggggagagagatcacctgttgtaactctccttttttggccaccagagaccccccttagcatatcattgcctacaaccatatctgaacatacatcaagaccaagcactttcaaaacataatctgtctcgacattgtggtttttgccaccaacaagtgttgcctgttgagtaaaatcagtttaaaaaaaacacaaattagaggacttccctgaacttgcatatatgcatgatttttcagatattatttataagatgagacaaccttcatgaatgcatcaatttctggacttggcagtatgtttttctccttatccaagcgttcaagatttttcacaatttctgttcatgacattagaccaggaaattaagtaactgaattctgaaatggaaaataaaaatagctaaaaatggcgcataacgaaactaatatattatatacatacctacatcacttgaaccttggcatctgttagcaaaatcaaaagtttgtctcactgtcagttctgacatgtgattatcagtttggctagtgtatgcagaagccctttgaatacagaaatcctattggaatttttaaaggttatgcatcaattggcaatttttccattccatttaaaaatactttgcatgttttctcattccattgaggaataaaatattcctaaatctttcagcttccttcagtaatatagttgcttgctatattccctcactgactgttatatcatgcttgctgcagatgttgttgagacctcttgtttcacaacttgttgtagatccaccagctctgttggatgacagcatgaatatactaagtgtgaaggaagttgatgacctactggttgtgtgcatcggtcaaatggcagtgactggtggatctgaccttttgtggaaacctttgaatcatgaggtgaattttatgatttctattcttttctactactcgttaatgattgggcaagtaaattgatactgacatactggtaacttactggcttcactatcttgtttttcattgaggggaaatgcatatgatcgttgtcctcgggaaacactgttatgaatatgactggttctactattctccctattagtttgggtgcatggatgccccaagacattttaacaatagattaagaatatgtctaacaatagaagtaattaactctctaaaggccataataaaagtgtaaattacagatatggccccccaaaacttttaatttaacgaatccactcctcttacatgtaaacattcagtcagtagctgtgatgcagcagcaagccaacaaggtggacggggcaaatgggctcctagcaatgccagcaggttcaaatgtggactttccaacattagtcattcaaactagaaaaacgagcaaatccttaccaaaacttcctttgctagacctccatttttggcattgctaacaactacttatcaacatcacctaagcatagtaaaatcatgtcctatttgggaaaactcaacaagaacttctaagagaataaaataagtaggtaaaatggattgagtttcttaagttaaaattaacgtgtgcacaagttaaaacaagtttttagagaacctaaatcagaacttctataaaagttgattttaacttatgagagaagcttaattcattttaagctcttttttttttttccttattctgtaagtgcttattgaatagtttatctgaacagggtttcagtcatgttagagttgaccttttctgctatgtttatctggctttataaggtttaattgtaaatagactgtagcttttatgtcattttgatcaaactttagtaataatgtcaattgacgctttgtatccctgcggttttgacctaccctaccggccaatgatctttaaagatctaaacttgcttctgtactcttgcatccccatttcataatacgttagctttggtcctttgtagtcatccatgcctcacttatgtgttgaagtgtttagcccattagtttgttgttatagttttgggtattcagtaatatgtatagctcttgaatgctatatgtttgttccccgcaaatactagtattccttagcaactgaatatatttctgccttctttatccggttttttgcaggttttgatgcagacacggagtgaaaaattgctagctaaaatattgggcctcagaattgttaaatatgttgtggagaactagaaagaagaatatctagtgttcatagctgaaacaatccccttccttggcgaactgcttgaggatgtggagctttcagttaaatctcttgttcaggaaactctaatattgaaacttcattataatattgaaacttcattatactagtactgaatttcaattatttaattctaatattgaaacttcattataagtactcatgattgaagtcatgaacttgagtgttaagaataaaaaatcagagtctgtcctcttaaatgtgttcgtccaacttaattaggattaaacaagtaacaaactctcaattttttaaaccaactatgtttatttaagcaaatagcttattttcacactaatgatatgataaatgctagatagtgtgaaaattaaacttttatttgtttttaaaaagataacaatgaaattaccctctattataagcatacatctttattgaaaataattatacaattatattaaaaaaatatttttttaaaaagtttataaacaattaaaagttttatttaaaatgattgtattaaataaccttgtatcaaaggaataagattatcgaccctcattacatatataaaaggaagaagaacatgccaacaactatttatttatacaagttataataaagtgtatccctcaatcaagtgatacaagttcgaatcatgactttgtatatgaaataaacaattgtaaatagaaataatcaccttatatgcactcacaataacatattaacattaatcattacttccatgaaaattattccatataattttatgatcaacacaaaaaatacacatagaaatgaagtaatagttgtgtcaacccaacaatccaacggtctttagtgagtggtcgttgagttttgaaaagcaataaattttgttgtaattttttttggatggattgattttcaaaagtttgagttctaaaaaacaaattgattcagttataatttattatcataattgaaaaaaattaagaagtgaatgtcaaatcatttgcattgagtatcttaactgtgataatattgagtatcttaattgtgataataaggctgttcatgccagacaaagtcttgatgctttcatgcaacccacaaattataaagacacatgcatgtttaatttctatcatttgaaataaaaatcaattttaatgtggaactaatagataattttataaaaataattatttattaaatatttatttgttaaaagttgaatatttaaatgattaaagtattataaaaatagtctccctctgataattttattacaagttttttaaaaaaaaaagtattttttatcaatattacaacataaagagaaattaagatatcaatcacaagatacaattgaaagttgtttgtaattgaaaaaatgtttgcaacaaagttttatcgtgttatacatttaattgtattttatgataattaatgttagaaatttaaaagaacaaaaataaaggtgggaagtaatagatatgaaaatattgatatgaatgtatgaccaaaaaataaaaacatgaataaatcatgatagtgtacaagagataggtgtaagattaaaaaaagtgtcaacaaattttctaagactagaatcggaaattaatgtttgggagaccaaaacgtggaggaaattttttcattaatctcatgttaaattcttttataagcgaataattttaaattcttatcagatctctttttagagacttgaggtattttcttaattgggattccaatgtttatttttatcaccaatttttacataacacacacaacataaataaactcaaattactaaaaaaaaaaaaatttgaccattgaaaaaaaaaatgtgatgacaacagtaaaagatgaaaaatgtcataaataataagtgaaaaaatgtgatgggaacatgagaagaaagataagagaaatatcattattaatattgaaaccgtgtttaaaaataacaacaataaatataattaattttatatatttaccccagttaaactgattattgtcaaatttgttcgttgacgatagcttgtgttttccattacaaatgttttgtacgagggatagggatggtattatcatggcttgagcgagtgcggtgtggcgattttgtctctctgccattacaacttaattatgcagcctccaactgcttctacatttcaccattcatctttctctcgaagccctcttcaccaaaatcaggtttcttccattttctctcaatattccttttggcttatctcattttactctctctcggagtttcttttttcatttcaaagcatttcctcagtttcagaacttttttacttcattcaaagcatttattgttacattatatcattgttttctattgctttccatgatgcagaaataaagttttcattttgatgtgtatgtttccaactttttcttttttgtagtaatagcgccctgtgaaatgtgaagcttatgtttgtgggccagctttgtgtgaagtttttgacttttgggttgttgttggtgacgtagaaagggtgaattggattgaattagttgtttgtagtttgggggaaggacacagtaaattaaaatgagtggagtggggattgatattggaaatgagaactgtgtgattgctgcagtgaagcaacgtgtgattgatgttttgttgaatgatgaatccaaacgtgaaacccctggtgtggtgtgctttggagagaagcaacggtttatagggtcagctggtgctgtttctgctatgatgcaccctaagtccacaatatctcaagtgaagagactaataggcaggagatttgcggaccctgatgttcagaatgatttaaaattgctccccgttgaaacttcggaaggcccggatggtggcattctgattcgcttgaaatacttgaaggagactcgcacgttttccccggttcaaatagtagcaatgctctttactcacttgaaggctatagctgaaaaggattttgggaccgcagtttctgactgcgttattggggttccatcatactttaccaacttacagagacaaacatatctcgacgcagcagcaattattgggttaaagcctttgaggttgatccatgattgcactgcaactggtcttagttatggagtttgcaaaacagattttcccaatgcagctcctatttatgttgcatttgttgacataggtcattgtgatactcaggtctctattgcagcatttcaggctggtcaaatgaagatactttcacatgcttttgacagtagcttaggagggagagactttgatgaggttctgtttagtcattttgcagcaagatttaaggaacagtacagcattgacgtgtattctaatgccagggcatgtaggaggctgcgtgtagcatgtgagaagttgaagaaggttttgagtgcaaatgcagtggctgatctgagcattgagtgtttgatggatgaaaaagatgttaagggctttatcaagagggaagaatttgagaatttggcatcaggattattggagaaatttaatattccctgctacaaagcattggctgatgccggcatgacagtagaaaagattaattctgttgagttagttggttcaggttcacggattccagctataactaatttattaacttctctatttaagagagaactgagccgcacgctgaatgcaagtgagtgtgtagcacgtggttgtgctctccagtgtgcaatgctcagtcctattttccatgtcaaagaatatgaggtttgaatattgaaaaaaacacattgattcttatcctatctatatgatatgtatatataggagagtagatttttgtgtttgtagattcttaggttagaaatgtaataattactaaatgaacaaagttgttacataggtgctaggtttattttctgcatttaatttgtctatcttaattgaaatatatctaacttcatagatatcattaatcatgtgtttttttttttttatagaattttgcattagcatgtattactctctataaaattaatgtaatttcctgtgtttgttcagatccaggattctattcctttttccattggactttcatgtgatggaagtccaatttgtgaaggattggatggtgtactcttcccaaaaggccaacccattccaagtgttaaaattctaacatttcagtgcagtaatttgctccgtctggaagcattctatgctaatccagatgaattaccacctgggacatctccgaaaatcagttgcttcacagtatgcctgctttagaactttactatgatgtgaaggagtttagatcatcttgtccgtgattctttgttattaattttttattaattattaccctctctattcttgcttctttggggtgcttcatgaaaggcatgtggtatagtctctatgagcttattcatcttcttcatttttactgttttggtatgtttaattctacaaaaaaaaatagtatatactatatagtaatcatcatcataattgcagcttttactcttgaattgtaagtctaggactcaattatgtataaagctattacttgttatacatgtgcttgtattttatcatagtttcaaccgtggattttttattcaatggttataaatgcactttattctttagaatgcattccctcactttagaggagtcaaatccaagacctgcaatgttgtttgaagttcaatgttgagtggtaaaaactcaacaaggaataaagctcaatattgccaactcaagaatgttatgatggataagtagacacacaaggtagaattaggaatgattccttagaaagttaggcaccatttgttgtagaaaatatggtagaatcgtgccttaagtggtttagacacatgtgaagacttgtagaagctctaaataaagagagtgaattagatggaagatagttcaataattagaggtagtaagagacgaagaaaaactataagttaaatcattaagaaagattaagatttaaatggtttgtttagacattatttatgataagacattatggtgtttttgatccatgtagccaaccccaccttcttgtaaaaggctattgttgttgaatcttgggacaatgcaatagacacctccccctttcttgaaggagcgaaagacttcattattaaatggccttgctgaccatcgcttgttctgatctcaaaggaagtcattgctgtaaaagtgttaggtatagcaatatgagaatctgtaggtgtgcacatgcttgaacaaatcataatgttaggagaagcagatatggtggatctaacaccatccatatatctactgtctaagtttctcaaatggagagaaatgactgtatttaatatttagtatcttcaatgacaattggctaacatttgctaatgtctattctatattataagacatctcaatattacaggacaatgaagttataataattggttgtgagatactgccattccttgtgccagtgattaaaaagtgttatgtatgcttatgcctacaccttgtttttgtatgcttatgcatttgtttgtcatttctattcagattgatcctttccttggatcccatggaagtaaggcgagaattaaagttcgagttcaactaaatttgcatggcattatcagtattgaatcagctacagtaagaaacctcaattttatctcttcatatcgcattattagttttctgagagatctttctatgcacatggacatttttgtctttcagttgatcgaggatcatgtgaatgattcagttacaacaggtgattatcattcaaattctgaagcaatgaatgttgaacctgtttctgagacagttgaaaatgtcccagaagattgtatcaataaaaagtgtgaagctccacatcattcagtaagtactcccatgttgttctctctctctcccctgctcacctttttttactggaagatatctcagatattagagatttctagcaaattgtccttttaacacgaacaattatatggctaaattttaattatctgattatttctgatactgaatctgtaccatgtctttcactgtcagtctgtcgcaaccgttttttataatgtctgtgatgttgtatatgtacatttttatcttgtggagattgttttgattgcagatatgattcatgttggtgttttgggaaaataaaagtgttactatcatgccttgttacaggctgatggtacaaaaaaaggtaaagccaacagaaggcttcatgtacctgtgagtgaaaaaatttatggtagaatgaccaaggctgagatattggaagctcaagaaaaagaactccagttcgccgatcaggacagaataattgagctgaccaaagacaagaagaattcgttggagtcttatatttatgaaacgaggagtaaggtacatattcaatatcttaatgagatgtagacatgactggcttctctgattcaattacattgtataagcggtcacacatttcttctgctaaaatagataattgttcattgtatgatcctttttttcttctttttcatatctttactgtgaggtgttccttcttcaaaaactagagccttaaattttgccatgtaaatatgaaagtattgaatatatcaaaatgagaaaaagctgttgtatatagtttaatgacttctgtcatgactcaagtaaatgtaagggtaaaactttgtgaagctggggatggtctgctgttatactttgtaataacatctgcataggatataccgatatagaattaaaatctgaatccttatgccttttcttaccgttgattttattaaagctgtattcatgtgtatgctctacttttcattctgtactggtatttaaatttatttgcatgtatgaatagctattcagcacatatctaagcttttcaagcgaacatgagaggaaggacatatctaggagcctgaaagcgactgaggattggctttatgatgatggtgatgacgaaactgtagatgtttattctgcaaaactagaagatctaaaacaggttacttttgtttctccaatctccatgtttcatccgccatacttcttgcttataatctccatcttctgcagctggtagatccaattgagtttcggtataaagacacagaagcaagaccacaagctacaagagatttgttaagttgcattgtagagtatcgaatgtctgtagattctcttccaccccaagataaagaacaggtacgacaataaactagtgaataagtataattgtgggatgtttcccttagtatcagtttttaagtgacaactttctttttcagatcatcaatgagtgcaataaagcagagcagtggttaagagagacgaggcaacagcaagatctttaccctaagaactttgatccagtattattgtcaagtgatatcaagagcaagacagaagatttaaactcgtatgattttaactttctgttttccttttcagagatgcataattgtagggtactatgatcattcatttgggtcagaattatacccctttctgaagcaaagcattgttcatttgctccaatttaactcgattgtcattatatacattgattttatctcaaaaactaatgaatgttctattttgatggattttcagagtatgccaacagatattgaaatccaagggttctccacttccaaaagaaaagggtgaagacaagcagaatacttctaatcatcaatgaagacgatgaatgaactgaaggcctaaatttttaatagcttctgataaacgtgaacttttttttaacacttttccccgtccggggagttgaaagagataacttcaaatacagtgaaatcattggtaattaccggttcaatctgctttatatatatatatatatatatttcatttttggccccacgttctactaaagccatccaataagttagtacgtagacaaccaatcaagtagtttattttttgtcaagggttgctagattttatgctcgtcaacaagttttcaatttaattccaaattgtattcaatctatcattttggatgaaataaaatcgtgaagattggacgcttctgcgaaactgaccacctttatggctttatctttattcgctattaacaaaagcaattttgttatcctttttattaaaaaattaaaaggttacaaggattttagaaaattaaattccttttctatttttctagtgaaaattcctaatttttgaatctgtacacgtatgctaatctcacgtatgtcctaatttaagtttccgctcacaaatattatgtcctaatttaagtttacatcgtctgtaaacttcagtatttatttggtacatgtgcattaaacatcaacaaatgaagccaataaacagcataagcaacaaaaatagcccaaacaattcaggcgaagcatctctatcctccgctcaagatagacggaataaaaggtcttcttgatgtcttcatttacttaaaatttgctatcatttctatcgttccattactttaatctacaaacaccagaagtaaattatgcataattgacatagcaacaagctatcataataacacagaaccaagtggtgaatcaagatggaatcgaagcattattgggaatcctaataaaaaaagtgaaacattatctaaagttacaatttcatgatggccaaagacattaggtccttgtgcactgtacagaactacttgcataagctcacaatatctacttgccaggattttttagaatcaaatcttcactaagcaacaagaccccaattcagtttcctcgtgcgatgctgcatgctggatggctggcttccttgtccgcatccaacacatgataccggaagtttagggcaatttaacagcattgaacctatagggtattgctagtcataagatccacaagtaaattatgggatgtggaccaggcggataataaatttcttgccatcaagtgttcagtttctcttcttggcatttgtcgtcttggtaccttttttctttcttgatttcttgaatcctgctccactctcctgtaaacatcaaaggcattcagtgctacatcacaaccaaaaggacaacaaaacatcagaatggtatgcaagtatatgtaccttccgatattgtctataagcattgcggcctgtcaactcctccccacttttgttgacataaacctgcaaggggggataaagaatcaggttctgatagatttatacaatatgacaaaatagacttaaaagcttttctcaattatggttctggtcctataatttcaaaaccactaggaattggtccctgccattaaacatcaagtaggaattggtccctatataacaattaatcttaatgtcaaaagaatgtttacaaaaacaatgggagattgagtatcactatctagtgttacatagttatattggaatgatgggatcgtgtgcatcaaatcatagaacaatatttccaaaaaaaagaggcattatgtaatgtgataatttgaatttcattgcacttatttaaatcttaagtaacatactgtatgggttttttgcatttcagttttaaacaacagcaaaacagctcgcataacttcttatgaccagcatctaacatgagaaaagtaaataaatttaaccagttaatacttaataacattaaaaaaaaataaagactttttctcatacttttcttccttctggtgatgtaaaccaatgaccagcagattcaccacttgcttgaacacgccttttgcctgcatcctttggcaaactggtgcagctcctgggttccacccagcccccagaagcacatgattggttcgcagggtttgatttgtttgctttactattactttttgagacactatttttagtgccattcctctttgttgctttctttctagaagattctccatggctgaatggagaaacaattttgggatccacccagcctccagaagcatcaaaagatccctcaacattcaaattacttgatttgtttttcccccttgttgagctattaataaaaccattttgaactccctgcatgtttgaagctcctccattaccaaattgtcccctgaaatcaaaatacaccaaaacaatatgtaatacaaaatgacaatcactttctttttaaatcattaccataagattaaaacaacaaatgaacatgggttacgacttacatgtaatcaatgtgtgagaaattaggttgctgattcactgtgttgatggtacctagtggattaaaattccgcaggcgactgcggactaactgccgaattctcggatcctcatggaaaaaataagtatgagcgggatgaacagggtctgttgattcacatcgttgttgatccctctggcagctagaactaaccccaggattcctctcattaaaacttttagacgaatcaccacccacttccttgcaattggcagaacgaaagtactcttcacatatctcattgaaggcaggcgtcgggacagaaacattcttcaccggcaaaaaatccttccatagatcatcagcaggcgatgttttcttattttgttctaaatggcggttagggttagctttattggcaccagcaatatcaacatcaacatctgaatcatcagaatctgaaagcaactgaaatttacaaacagaaacattcttcaccggcaaaaattccttccacagatcctcatttccattcacatcaaccgaaggtttattatcttgttgcaaacgactgttagtgttaactttattggcaccaccgacatcaacatccgagtcatcagaatctgaaagcaattgaaacctattaacagaaacattcttcaccggcgaaaaattcttccacagatcctcatttttgttctcgtcagcagatgttttcttctcttgttccaaatgactgttagggttaactttattggcatcaccagcaccaacaccaacatcagcatcatcggtgtccgaatcaatcaattgaaaccttcggagaggactagtggttaacttgggaaacatcaagccactcttccctgtctctaacctggcagaagccggaacatcattggaaagtacctttcttttcctatccctgaaagagttgctacacgaatgaggggtcaaaaccccacttccattcaacgaaactttcgagctgctacacacagaatgattccgattccatgccgatggaaccgcatgccctaataatattacaacagataaataataaggaaattattaatattattatttaaaattaaaaagccgagagagaggtgaaatatttgaagtgttagctaacctgaccttgatcgggatcttcttgagaggagaactcctcgatgtcgtcgtcggcgtaggcatcggcatcggggtcgagatacggcggcgggggcccgcgacggaggcgtttgaggagggggcgcggcgggtcgggtcgggattcgggatcggagtcggagtcagagacatgaagatcgggagaaagaggtggatggattggggaatgggggggcgtatcgtcgagacctagggaaaatgagggcacttcgaaattcgccatggaaattgaattgagatgtgtgtatgtaatgtatataagggagggtttaggggatttgaatttgggggggaaatggagggaattgaaatttctgattcgcgggtgcgcgactgaaccgtcttcaactctttttttctgtcttctttttttatatgacagaatcaagatttacataactcactgactttgttgaatcaactgtaagtttcatttttttattctgtaagtttctttttcatttacaataaagttcttttttattctgattttattgcttttgctggaaaaatgttgtgaacgtgataaaaggaatttttttcttcagattttatttaatatttagcttattaatttattcaggataaaaggcattatttttattgttattataattataaaaataaccacaaacataataaaaaattaagtcaataacagtcaaactatctttgtaggtcaccacatttttatgtttttcagatggtataatgtatttaaatattaatttgttatagcaattaatttcaataaacatttaataaaatcaaaatggaaggatatgattataatttgaagaaaatttaagtgattaaattaacacaattaaaatttaaacgaccaaactacacaattatgataccaaaaaaactaattaaatatcttaagttataacatttttacataatcttttaaaatcataattcaatacattctttaagaatgcaattaaatcttcttttttttcctctaaaatatattcttttaaaaaaccaatgattaaacaaatttaattgtaaaaaaaaatgaacgttcaaattcaaattatcctgcataagattcaagtagcattgtcttctatggaagataaacatgagaatacatgtatttaattaccatgataaaatttaataactttataattaattattatataaaaaattcattcgcacctattaaagtgaaaaagaatcattctgatttattcacaaattaacattcacaaaaaacttttatatccaaaaattatttttattattttcctctaaaattgaacacatcataattaaaacttctaaaggtagaaagctttccttctcgtgtaacatcataaaattaaaacattccttacgttaattatcacctcgacttaattataatcagcaaacaaaggaaaaatgctaatttcaatttcattgttttttttttttttatactttgacaacattaactatcaaaatgaacaataaaggagacaaacagaaagaggaaaaggtcccagagtaagtattaagttatatttttttgtcccggtaccacaaatcatccttgccacctcctaaaatacaatctacaacaaatcctaagcgacatacacaatgatagaaaatcaaaatcttgagtagataatgctatcatctatattatatgacgatcttttttcccatcacatttgtcctctgaacatgataaagtacaacacatgctacatgcttctcataattttctcaagaccctacccaatgaagcagggcctgtaatcacagatgacaaagcgagctatttcccaagatatcccaggttttgaggaatttagcacaagggaatgagaagattatctgcttttaaagcttaatatgaatgataatgaagaactgaaataaaaactagaatgaggcagaaaatgtgcatctattcatgacccctcatcactgtgagcagatttttccataaagcagcatatttgtaccctcacaatctaaaatgaactgcttttcatcaatcatttatcaattttacaggttggcaatctgtgcaatgcctatgcccaaaactaaatcttctgtttaagaacatggcgcaactgaaccttctggctttccattctggcctccataagtctggctttcaaactattcttctgtgcagtgcgaggaatgcatcccttcatgccttgatgtgcatgtggacttcctgactcgggactcaactggtatagaaggtcttggggactcagcccacctttacctgatccatgatcgggagacatgatgacaccattagataacattccatttgaaagtctcccattcattccctccaaagagattatcttgtaattgtccccattgtttgagtatgttgacctccaaagcttcgttatggatgataccttttttgcttgcttagttggtatagagcacacttcacttatttcagttattggtgtctcctcacctgcagtttcttcccattcaagtacacttctccctgagacgttactctctcggtgattcctgttcaaagatcggctactcccttctggtgaataacttgagccttgatcctcgacatggctcacagtctcccatccactttcatctccttctatatccccattatcatccataaatacatcagaacgcctctgaatgccacctttacttattgcattggcttcaggactcaccatgtcaatattcgaggcatgactagcaggactgtgagaaacacatggttcaatctccctctcatttacttcaccaaaatttgcatcttcaaaaatggcaaaaatgtcatcagagttagggggttcatatgaaaatcccttaatgtctagaatgttcattgcagcggcagcctgttgaagtgactgtgcctctttcatgtccattgtgttcggctctgtgctttttgacctgatatagctttccaaatctgcaacgagtctattcatctgtgcatacttctcttcaagagcaactttagcatctatcaacttcatttgaactcgttcttcacgccatacttctgccatctgtaacatcttgctctcctcttccacttcttcccttagtttcatagattccctcttcaatgcttcaacttcagccttgtcttctccaatttccttggcaagctcatcacacacttcctcgatcaattctctggccttcctttccttctcataatcctgcatgtagcgctttgcagagagtttgacatctgccaactcattaaccaacctcgaattgacaatttcaatcctctggcgatttttcctttctcgattcaactctgctttaatgtcatcaatgtatgcgcggattttctcatgctctttgcttctccattgggccctttcctcactgactttcttcagaaaatgctcaagcttctttttggaggagcggtgttcagtctcaagttcctgaattcgtgtttgtgcctgctctagttcagctccgagagcagatacaacagatacagcacttgccttttggtcaagatgtttcatgtggctgtagatatgctgcgcttcctctgatgtttttgaacataaaggattccattttgttgcaccctccatttcattgttgggaagctggaaacgttcaggctgaatagcataaagtaggtttaaaattagcactttaattgtctgctctttcacttttagtgtagaagcagaacactttttaaaactcttttgctcatatagacattggaaaagctaatttcaccatgtaggtttacatgaaaaatgttttatctaagccatctctatactgttatacatagcatgggtcaatacaacaatgagcataatttgtttcaaagtgcaaattgggtggtatcaacccataatatgcatgtgtttgcatgggcaggcctttgaaatattactaaaaatttccacaatatgaactcataaacaacacgttgctatgattatagtttgtcactatctataacttaataattagatgattgatgtcattttcacaaagatgattaaaacaggtaattgcatgaccgagcaatgggatattgggatcattgtgcagtacaggttgcagttttaacttgagttattatgtgtatatgacattcagtcaataatgttcaattacaataccaaagagctgtaaaactcctaatggttatattatattgatattgaagtagtaagaaaaatcatacctcacagaagtgtccattctttgtcccaaatatggaacggggactttgagatggattcttcttcagatcagaaccatgggtcatgccattaggatgaccgagaaactggagccctgcgtgaccaattccattctgcagataagtgtcatcagtgatcagtaatgagaaatggaaacctatgaaattaatattgtaaaccagctacattgatctacaaacgaagacaataataaagtgcatggaagataatcattctctaattcaactggaatgtacagataacaaataacagaatctcatataaaaggaagactcaactaaagtcccaacttactctcaaaaagcacaaaactgacaaaagaatataagttcatacaagccaatattattacacagcatgtttgtttgacattctgccaaacaagacgcaatattcaatgcactctggatggatatgatttaatgcagcacgaacggaagcaactgattcttcctttctccgaacacaagtttgcgtttagggaagaaatcttcaacataacgataattatttacaaacacaaacccaactcaactcatttctccaatcattacaaagactataactagtcctccactagaactacatcactcgcgagaaaactaaaaaaacaaaagcatttgtatcttcaaaagacagctatttttaatttcatagaaagcctaatcggctaacccctaactctaacaccaaaacaggaaagtgaacaataatgacaaggaaccaaggatagaatctgaagacccacgattcaaaatcaagcaacaacaaaatcatcatatgaaaataaataaaccccaacaataaactattaattcttttttctccatgaggggtggcctacaatacagtagatgaagtaacatagtagcatgtagctgcaaaatcacatttaaatcaaaaacaacaaacacatgcaagatgcaacaacactcacacgggaacgaagaaaaactagggatctcaaacaacagaaagaaagaaaaaaacaaaagggtaaacgtttgagatcccacattgaccagtgtcataggcaaaacagtgtatataagcagagcaaaaccctcgcagcaaaaactaggttttgcgactgagttaggtccagacccagagtgtaagaagagtagcccaagttatgttccaacctaccttatgttccaaccccttccggccatcacccgtggccgtctccggcagatgcaaccgccacagtccggcggctagtctcctcgccgacacggcgacttcggcttgcttcttggcgctccggcacgttctccggcgggacccagcgacggaagacttctggtcgtcttcgagtggatcgtaatggatcttccacttcaaaagaggggtttcgggtctgctccgtttgccaccgtgtctcctcaaccgtgtccccggagttctcgggttccgtcgcagaaatggcttcgccggttcaagatctgagtccggcgaagggttgttcacgctcctcgaagcaatgcccgccggaaaactccccttgccggaaaacttcatcgtcgccggcgagtctcagccatttaatcaaacaaacaagagttacttgcgagaatgaatggcccaaagagataaaatggaaacagagagtgtgtgtgtgtgtgagagagagagaggagatagaatctgtgtgtcgttggagtgatggagttcgtgaagtgtgtgtgtgagagagaggacacgaggaaagtacagaagagagagggagagtttcactgtttcagagattttgctgagaaaaggacgaacacagtgacaatacaaatacacatacgcaaagaggtgtacgtctttccgtatgtttatacggtcaacgtatctgctatcagttatcatgattccacgcgcgggaaaatgttatacgatgtcgtttggccctacttggtttataagctacgatgtttgttaggctgctggtggaagagacgttctgatttgaatgatcgaaggatggtggggggtttcttttacttttacattttatttattaggatttatttcaaggataatgactttaaaatattaattaatttatatgtgaaaaaagatatttaagatgagttcaagaaagatttattttatttaaataatgaaatataattattttaaaaaattggaccaatttacatttcaaatcaattttattcatttttatcttttattgtttattactttcaaacataattataagattttagagttcacacccttttaattgttccttattaatttttttgtgtgaattaggatattttttaattgttttttatcaactaaattaatatttgttaacagataatttcatttaagatattgttaatataatatagagaaaataatatttgtttacataatatagaaaatcagatatataatatctaaatgagtaaatgtcaagggagtaattgtaaattctcctgacattttctattgatacggatgacaaaaatacagtatctaaattaatcactcaataaaaacttgattttaccatttatgtggttaatttgacttttttttaatatttttagttataatttgaattttaatattttttgtaaaagaaattattattaatttaaaataatattttatcactataaactatttatcataaatttaaaatataatttttatattaagaatatttattttaaaataatttttataaatttgaagtatttattcactataaatttttgttatataaaataaatatttattttatacaatgcaggtactaattcaaatattagttataaaataaaatatagacttagattggtaaaatttgaatacgaaatgatacttaaattttcattagaaatatttcatttaaattttaaattaacctaattgaataaaatgatgatgaaaagtgattcaacgttgtgaatcaaagaaaaaagttaaaaaaaaactaaacccaattttacttattgctcatttagtcaaattggaatgtatattatttactttgaaataatccaaacattgcaaaaaaatgataaggtttaaaattacaacctctaaaaaaagtttaaaattacaagttcgtattacttaaaaaagaggtggatttgttcatttatttatatttatttcatatcatagagattcgatttactgttattctcgtagacaatgagtatataattaatgaagcaatcaaacatttatgtcatcgtcagttttggccattggccaaatcagaaaataaaaacatctaacaggaatgaatgaaattagaaacaaaaactattagaaatccaaatttgaaagaaaaaatcctgttgatttttttcatttttccctgcaagtctgaaaattgaaatataacactatggtatcgtcgcctataaaataaaagaaactaaaagtacaatttttttgtaaaatatatatttatatttaaaattatttatgattgattaataatgtatatgtgtggcaaaagctgtctttgtactctggtggtttatagctttggcacatcttgtgcttagcttggtttaataaattttctgctgttaaaaaaaatacacaactccataattttatctatttctataagttattaagaatttttgtcaaaggataattcattcacgaatgaaaaatgataaactggtgaggcgtgaacattgtcactttagttagagaaatctattgagttccaaagctttttcaacccttaaaagtatatatagtagccacataatataagtcggatagggtaaaagtgcgacaaatatgagagcacaaaacttggatcatattaactaagatatgaaggttattccgtgtgttgaaaggcacttaaggtgtcaatttgatactccattgaagacaatataatggactaatatctgacttactataaatgatgaaatataaacttcacagactattttttaattctgtcaaaattttaaaataataccacaataggtgtcaaattcacaaactgagtttatgacaacaaatgttaaatgttaagataaaattgatttcgtcaaaaaacaaagaagataatatacttaaagggtttaccactttttacatctaactctaactagactctttaaaacagttcatacaaatgtgtcgtgtttcacgtaaacacttaaagtgtaacatatgctgttttgttaaagctaacagagaagactttatagaaaaactaacataaatactatttcttgtttttcacgtaagaaacaaatacacactgcattaaaaacaatctaattggttcatattaattattagtgacataaatttaaattttatttaaaaatattcacaaaattaatggtttaattaagatgtgactatatttaatgatattattaataatttaaaaatattttttcactggtgaatgtgttaattttaaaatgaaaaagattattacaaatcaaaatttctaatcaaatttatatttaaatcaaatcacattcaccagtatcttgtaaaagaaaataattaagttatgcattgaaattgtaaagtatttttatattattattaaattataaattattatatataataagtttattgaattttattataattttttaaaattatattaatgataatttttaattgattgataatataaaataattttataatatgagttaaactcatatttgtgaacaaactttattataaaataaaaggctttaaaaattaacatttaatatattagaaaagatatttacatttctcataattgatataaaaagtatacaatgtttatttacttatttcttatataaactaggggagatatacatagtaatgaattaaaaaaaatattatgtttattttattcgtttcagatagtattgataaagtcttagtgcaagtcaaattcagaaagtagagataagagatcagtgataataattgttcaagcatccagaaaagaaaagggtacaattttccatgcccggcgtctacagtgggaaagtaaggtagatttcccactgtgcgtaagtaaccgtggtcattggatttaagtgattttgagatatatgatagacatgcatatattagaatttttattttcttttactattttttttttttacataatgactcttcttcttcattagcatcatcgtcgacctctattagtcgtcgttggagatgatttctcacagcatcattttttttcctactttcagtttttcatttcctttcttttcttacgctctccttctccaaccactgagcgcagatccgaagtgaaatctaaatatgaaccaaacctcaaacactaatccaaagcaaaaaaacaatcgtacaaaaaacacaaacgctttcattcatgaaaacccccaaatttgaagcgaaatttgagactctttcatggataggccaaccccagatccgcgacaactagcatgcgtcatcgacgccaggtcgaagatcagtgcacgcaatcaaaaggcgtaaacttagaaggattaatctcccatttagatctcattgttggaattaactggaaccaaaggtgtagtagagcgcggatgacgacacctttttgtaccttccttcacaaaagttccaagcgatttgttggagtacgatgtcgtcgacaacactggtggcgttgttgacgatgaaaatcttgtcgacgtggtccttgaagatggttgagattggaggaaaattgttctaatgtgtgtaaacctatgataatctcaaacatatctaaaaagcatatagatctaatggacagtaattctttcccacggtttaggtctccaacgttagacatcgccctcgaaccaaatgcatataactaaaaaaatttagatgttcaaaagattcttctttatgcaaagataaggaagataaattttgtaagcagttttacttttgttaaaagagattgtttttgaatttttctttatgcaaagagaggaattttataagtaattttattttttatatgtaaaaagttattttcaaattcaaaatcaaaacaattttattgttgtgtgtagtgttattgaaatctgatcggatcgactggtccgatcggttgaatcgagaaatggttcggtactgtcattaaattgatcatacagttgatttggtcaaactcaatcggtcagatcaagttcgttcgatttttttatgtgatttttttatatgtgtttttttggatttttttaaaaattttggattattatcaatagttattttagattttagagtatgaatgaactttttttactcaaataatattagttatatatttatatataataaatacatatataattttaaatttttaatatataccaatttaaatcgattcaattaataattcatcggttggatcactaaatcacttatccactacctcaacttacctcgactgattcaataatcgaaccgattttcatgacacttggatatgtgagactcagcttcaataaaatgcataatgtttatttgaaaattgatcacgcgcgaggagtcggtcgtgtagggcacttcatagtaaagcaagtgtcgtcagtgtctgatctatttgttgcttgcacacttcactatctactctgtttcgccctacacaaaaaggcatccgagggagactccacgtggcaaccaaagagactgtcacgtcgataaatacaaaacgtgcgctccaatgctccatattaaaaaaatacgctctcacatgggcttcgaaattgattaatactatttattttaatgagccaaccctctataaagtggcataataagtgataactttatttttttctttgtttggtacgacttcaatgcagaattagatctggatagcttattaaaattaaaaatcttaaattaaacaactggaaaaatggttaatggctgcgcatcctaacttgattttcattttcattgccattgttaggtttctttttttctctttaattcaagtaatgctaagtaaattaagaaaatacgtacaactaattggatataaattcttataaattttttcgaaggtagaacgagatatgtgttccaattttcacattgtcaatgcatgcaaagccgaagtgccaaccaaatacatgggcagaaactgaaagaaaaaggatacattcacagaatgtgtgaggttctacttggctcgtcgctcttgtggggcattaccatcatgggtccaaatttaatttatacctgattctttaccattttattttttacttttctatttggagcatgtgtaatttaaatttttgttctaaattatgagcaaggttggacttcctcagaaagaaaatgtttgttgaatagattttaaaatgcatatatttattacttactatgaatgctattattttctaaatgtttattttgttgtttgatttagtttgattcgtttcaataaatatatgaaattaacagtaatattcctttaatgaattttttcccctttgatagaagattatttttcttcgctaaagatgtgatcttaagaagatattttaaatatttataaaaatggagtatttatttttatttccgttattatttttcatttatttgtataaatatgtgaatgaaataagacaggttaagatctttttgtttcccctcgtcatgggtaatattctttgatgtttatcacacactcataaacttattaattaagtattctctttatcttactctcaaaaaaagtattctctttatctttaattaacattaatagtttttttttttacgtaacctgagtagttgttttgaacaataaaattaattgatgtaaacataaaatcgttcaagtgctttgctatataaacttttaggttattgttgctttaattttatcgaacaatatagacatttttttcgattattatattatagtatcatgaaaatatataatgtgaaaaataccagttgatgcaggatcacgatgtacatatattgtctacatgcatggaaaattggaaataacaagagcccacgttcagtggggacttcatgtccataatcagcattgataaaataatagactatgtacgtgtcaggactcacgtgcaatgatgaaatattcttttcgttagaaagatagattatatttatataattaagaaaatactacatagttatactatttttttcagcatatggtaaaaatgaatgagaaagaaaaaaaatattatagaaattattttaaaagttgtttatatgaataatataattctaaaagaaatgataattaccgatagttataattttgttcagcaaaaaaaatgaatatgaatatttatttatcttcaataaaatattttaatatattcagtcaaaattacacaaatgaatatgaatattgtatatgatcaaattccgaccagaaaaggccacgttgcaattaacaaattatcttttacacagctttttcgttttttttcaccacgttttactcttgaaaataatctgataaaacttatgcatataatacagtactagtaaatataattagtaatgtctaagatgtggtggaacattcagatttccaaacatactcttaatcttaatctttagtaatggttaatgttttgtttcccaccttatccagcaaagaaaaacttatgattcaccaaagttagtctgctctaaaccaccattaagcattaacaattagctagctgcgaatgtattttttactaaaattactaacttcttttcctttttgctattatcgaaggttaaattactgaccaaattaagaacacattgtattttcctcgaattacaatgagcttagccttagtccactatattacgtacctagggtttttcatgatcgtcgataaacaaaatatcaacaagattatagtagagggataagtagcctaccgtaagtcgttggtaatttaattttgatttacagtgggttttaggtaatagccggaattcttgtagtgtttattccttttgttttgtttcccaccttttaattctttataccactaacaattacccgtttccaacttttaaaacaatttaagtaattaactactacttttgtacctaatataatattctttaattaattcacaataattagataagttagttaatttaattagtcatgttaaatttgttaatagtttgtattatttttttaaaattactcttaaaattaccaaaatgcataatcttttattcttttcacttaattcctatttaattattaacatctttagtcatattttccaattctcgcaagagaaaaaaatatttttttcttattactttgtaccatttattgttaattaagtacaaaaattgtaaaataattaaaattaatttgataaaaaaataatgcaaagacaatttaaaagagatcttaaaaagagataaacaaaattttcaagagtatatacagatatgaaaataataattaactaacaaacatcttacacatcatgtaaatatttataattatagatttttttatattaaaattgtattttttaaaaattataatatttttttttaccttttacaatatactttactttatgttaaggtttatgtgtgtatatatatatatatattatacctaataatatattttatatatagtatttttatatattatatattattttttatactagatacacgtattatgatgtcatgttattttctaactcagtttctttcaaaagataaaaattacgctaaattaacaggatagattaaacaaaaagataacataaccatatccggccaatacatcaaacaattaattacaattaaatatgatagttattttattctatcctactttaaccaccaaattccctaacctcccaccacaatgaagtttgcctttttcataagatcacgttctaatgtttcaaagaaagaaaaaaaaaacgaggcaataaaaaactaaaactacttcgttgaaagaaacaaattatacattagtaatttctataacttgaagaaattaatctctaactaaaaggatacgttcagttgttaaccccccaaccccacttcaaaaacaaaaaaatgtcgtgttactaatcaagaaataaatttatataagggaacgtaatgaaatagacaatgctatcagtttctttcaaaagaaaagattttgaaagaaactgacagaagagagattatgacagaaaagaaatacacctgatatatagttcataagaatgaggagaaaattatttaaaatggtcaaataaaattaagttaaaagataatttagtctacctaatgtaaaagttgtccagtccttcaaatctctccaattttgagtgaacaatttcaactaccttctccaaaattttggatcaaacaaataaaaaattataataatacttatcttccattcccccttctatttctcaccaacggaacactaactaaaggtcgtggagataatatttcaaagcaaagccatattatatataaaagacgatatacaactctatggctatatccatcttcaacctcaaatacagtgtgcacaagctttgttgatatatttacaaatacttactaacaaaactatggactttcaatatctgaagaaccggttgcattgatctttgaaggcaattcacttatggcaattaaccatagcaccgaattggatcattgcagcctttagaagcagattgcttgaaaccaaatcggccacctttctcaaggtactgctgatggtactcctctgccctgtagaacttcttggcaggaaggatctcagtaacaatcttcctgttcaactgcttctcctgttgctccaatgactccttggccgccttctcttgttccggcgtgtagtagtatattccagatctgtactgtgttcccacatcattcccctgccacacaacaagatcaaatggtaactaagcgcttaagcggtagaatgtacaatccatgtatgtgctgctgcatatcataactagtcaccatattttcaaaagttcgtgtgtgcatggatttggatggaagagtgaattcaagaaacaaaattattaagaatgcatattgaaaggggagaacaaaagaaacaagggacaagacaaaaatgtagcaaaggaaatactgaaatagattactccatatggaaacttatttttggatgctcacaagtcattctagagagccatgtataattgaagtccaacataagaagttggaactagtacattgccacactgaaattaaagcaaaatcatcattgcattaactcctaaatgcaactgataaatggagttacagaatgtacaaagaaaggagacaatccatcggatgttaagatattggatcaatgataatcataggagctggggttcattgcaggttcttttgaaaacagtgctcataagaagagatgttttaataagagagtttttgctgacaagaggaaaaaataaataaatggatggattggatatcttacccatgaaacattattaatggatgggttgggatttttctttatcatataaagtcatggatggtttggatttttttttaataaaattctaccacatcataaatgaactaatggtttatttttgaaccatctattttaatccaacttaatttatcctaaccatctattacgttacacccctataaacatcccaccaagtgcaaacagaagggtaaaaacaacctaaacaactattaccaagagacccctgcaatttgatgcgacccaaaattcaacacaatatcatattaaaacagaatttacaaaacagacatgactagatatcaaaccataaatgtatctgttaaataatggctacatagagaaaaccaaaattactaatttactataaataaatcaatcaaggaatcaaaaaagtgttggcaaaatgtttaactctagaagtaatgcatcattaaataattgtacagaaaccccaaaagtaacaaaaatcatttatgctgacaatacacaaagtccagacctattattcatatcagcaaaatctagaaatatcaattagaaaccagacttcctcattttttacatgataccgtgaaaaataaaaaaaataaaaaacttcatatatacctgtctattcagtgtggtgggatcatgtctagcccagaacaagtcaagcagagtctcatagctacaactttttggatcatattgaatccttacaacctcggagtggtttgtggtccctgtacacacatcctcataggttggattatgcacaagcccctgggtgtaaccaacctctgtcttggtcacaccaggcaccctctggaaagccaactcaacaccccaaaaacagccagcaccaaactcagcaaactgctggcctggtgctggtatgtcatcatctggaccctgaggaatggatgaatccatgttctctggtgctcttgcgctgccaaacccgagtctgttcaacaggttcatggagggcttgttcacggcaatgtgaggacgagtttgggaaaggaagcacggacgcttgacagaaaatctagaaagtgagggcaggaacttggttttggcaggactggagagggaagaggaagcaaacactaaaagcaaattggacgtggtggtgtagctgctgctgattgctgctaagcatttgagtaacatgagagtccttttctaaatgaaataatcaacttcaaaatgctcttgtatatatgaaaaaaacaaaagagccaccaaatcaggatgccaagacaactgaagttacaaatttgaacagataatcggaagtttaaaaattaattttgaatcactcatccatatggtgctacatttattactataccacatggcacttgtatattggtaaatggtaatgataaaagttttacatgaatcaaggatcatctgaactaataaaataattattctctgttttcattttgaattctcacatataattacaaaaatatcatcttatgcttactttgttccctattgtcaaggatttgtgctaggaccaaccaaaataatttgtagaacatggaaaatagtaaacaaagtaaatgtaagataagatttttatatttatttatgaaaataaaaattgaatacatatattttctgaaaccaaacacgtcctaaattttataaagataattaggtttaaaaataacttaaactcccatcccatcacatcactttatgttctagtcctaatcacatatattcctccctctaacttttggatattttttcttatagtatatgtgttttctcccccaaacatggactacaactttacaagctgcagactcacatacaactgtgcctactattgaacactaatttaacacttaaacacgccactattttttattcaaataaaacaattagccgatactctttctttcatgcatgtatgcaatcagacagaaatagagaaaaacaaatccttgttatgaaatatagaagtgatttatggtttaactattagcactcacttgggggaagaaaaagaagacaagtagtatagtataagattccaatttcatagaatttccaataaatggaaatccgtattgggtcaaagattgtgccaataaataaaattatattttctcatgcaaacagctggcccagtgtgcatccattgctattcataaattgggaattggaacagaatcacataaaaataaaaccaaactcacaagacccagaattgggtgcataaacatgaaggaaataagtccaccaaataaattaaaggaaatccaatatcaacccatacctgctccacaaattctcatcttcaacccttcaacaaattacaggaatcaatctccacacaataataaaggtaatttttttaacactaagaagaaaaattgaactgaaataaggagaacccacaattcccttttcctcacaggttaaaaggaagagggaaatgggagaaattgaattgagaaatgagagaaaacgtgcaattggagaatgaagaacacaacaatacgtaccccaagtgactgagtgagagagtgatagcagaagagagagaggttgctggttgaggattgagagaagatgaggatttgatcactgcaaaaaaagcgacccttggagctgaacaatcatgctttatcagtttatctctctacgctggcatcaatcccgaaaagacttaaaagcccctccccaacttaccaccaccttttaaagtgtaaagggtagggacgtcatttcccaatcaaaatcacattaaacccatcacctttcgtgttggagtttgcctggaatgtaacgcctagaatattacaaaaaaatagtgcatctaagggtgacacgtcatgaaatatggttcatgtattattttttcacgattttagagagatgatgtataaagtaaaaaagtgcaaatttcaaattatttactttttattaaattaaaatatctcacaatttatcaaaaaaggcatgaatcaactggccttgataatataaaatttagtgttatattttttttttaatatatatgtactaaagattattttttaaaataaaataaatcaagttaatttataaaagttgtttcatttattttttataaatactttttaattaatatataagttaattttaacttataaaaattgattcaatttatatttatatttttataaatatttattaaaaagtttattcaaacaaaagctttacctcttaatagggaataaatcccattagaaatgcatattccgattgatatcttccaattaacacaaactaaaaagccccttttatctagtttgtgttccttttttttcttgctgctgttttatttttcgtatatgtacataaaaaaaaaaacacggaacttctttttagtacctttagaaagaaaagtttgggtcactactttatggaaacaataccatttttagtgtcattatttctatttttatagctataggtttgcacttttatcttataccagaagccataatgattatacaacaggggtccgtataaactaattgttttacacttcttacttgatgtagcttgtagcttgttacatgagaacttaatttccgtttgggtatgtgtccttggatttaaaaagattttttttttccacctgagtatattaaaagtcggagttaaaagtaatgatgtaattaaaacaacttaatataatatatttattacgttgttatcagctttttacgagattttttgtgtgtggtgtgattagctccttggttttgttaatgttcttatcattttcttacgtatagttgcaacttttttacctattcaaactaacaaacaaatcaattcacagggcgtttgtttcactaattatttatttaattctgaaaatattttttcttgagaatatgacagagaaatattattcacaagtattttaaaaaaatatattatatatctgataataattattttattacctcataataagtatgagaataatatttttcaatcttatattttcaaaaataaaaaataatccgtgaaataaatgcgttgcagtacataaagattatgatgcattcttcgggcaaaaggaaaaatgagattaggattcttgtttagtcttttctttagtttggattataattggaattggtcctttacattttggttttcctaacgagggaagttcacaaaggaaagtatacatttcttcaaggaaattgttcgtttttttttttctttacatcgagctattgtttgtttagcatttaacaacgaactaaggattaagttttgaaaattttgaaaaaaatggttaaatacagtaaaataggatttcgtaatttttcaagtttttacttatataattgaaatgtgataaatttaagtttttttctaagtatattttattaaggttttttttaacctctcgccttaaattttgataaacaaaaagaactaaaattggattggcttatttatttataacttttttgtgaagagatagagacgggttatgtatctaataaaaaaaaagagacaggggttgtaacattggtcttggactgtgccaaaggcccatagtacgtaaactcaatcgtgtcgtgggctttttgtcttccacaacaggcgaccgtaaaatactctgggcttataagttcggctcagaattaagcccattagggtaagaaataagtgtaacctcaacctcaatggtctggtctgaactgaattataaaaaaaaactcactgaacttattcaactcaaccgaataaaaaaaggaattgagtctacactctacatattaagtaatatctctcaaagattaaaggataaaaaaaggaggtctttaattagtaggtgtcggcaaacaattttttaaaacattttgtggtcttatatttttaagaaaaagataggggtccacttaatgatatagagtcaaacgatgatcacttgataactgcaacatagccattacactatatagtagatagccactcaactctgtctttgtatgtatatatctttgaagaatattacaacattcattttatattgaatttttgtcctatataacgggcattgccagtaaatttttttattttatttttatatcaagcaatttcccaatgcaatttgtatgcatgtgttttaattcaaattttatttttctttttatttaaaattgactttaaacttaatgtttaaaatgaaaactttgaaactaaaataaaaattattttacatcctttatttcttttaatttaaaagaaatgataaaacaaaaaggagaagatagagtaagagaaaatgtaaaaagtgactcaaaattgttctttttttgtattgaaaatctacttttttccgaacatgattcttcagcacacattgattagtacattcagtttaatatgaatatatagaatggagatttttttttgggttctttaacccggccagttattcttgaaacaatcttcttgtgttgaattaattgggactcccaagtcctgtttatacaagagtaactaacattaatatgcaatgatgtaagttttggagtctcttaactatttttggtctgactaaaagtttagatatggactagagtagtttttttactctatataatttatattactgcttagaaaagaaaaagaaaaaacaggtaatcaacattaatatgaatgtaatagattgactgtagtgtaaatttactgatctataaacaaaagtatctgactacaaattaatcctaaaaaactatatttacaaattaataatattaactaattacaatttctataaggcaatttctatatatttattattgtctcatttaaaaaaacaaaaatgtaaagctcatcaacaacaaacataaaaaatcaacgggcgttagtatatatgtaatatttcccaataatattttgtctatcacttaatattaaaaacctttgacaatatttaaaaaatatagttaaattataaataaatattactaatatatttttgcgacattttatccaatgttattaggtataacccatgttgttaaagtctaaaaatgttaaaaaagaatttaacaattttgatataatgtgaaaaatattttaataatatttgtttatgatttgacgataatttttaatgttactaaagatttgtagtaatgtttttattaatgtttgataaaaaaaatgtcaatggaggctacatatgcagtagttgacatgttgtgcagtccaacatgtattacactcactcagatgtgacttatttaacttttataattcatattttcttatatgccatgcttaaaacataacgccgtttattactgattattcaactttgatacacctaaacgtggaaagtagaaaatttcaactataacctattgtgcttttacaagtcctaattaattaaggccgttattgaaatagagtagtacatttgacgcagtagttgtaaaacgagcaatcaacatcagttacacgcggtgatttttaattaatatttaaggaaaattaggtagctactagaaaccaattattttcctttgattagttaattactaacacaggtacacaactacacaagtcttgggcaaaatactatgatattcatttaaaatttaaccctgcaatgttgtcaaatgaaagccaagtaaaaacattaatattttagctagagtctgcagctaactgctgcttaattaagacttagaagtcaaacaaagggaagatagtagtcaacattcgacaagttaaaagtcatatttgaattgaccatataatatataacaacaatgaaatggccctagaaaagaaaataagccattgggagattaagatagccatggcgcccaacatttgcatgcacacataaagtcatgagtggctgcacgtatttcatgggtgcagcacgtgatccagcattcgcgtttgtgcaagaatgattcaaggttttgatttttagaaatttacttatattttggataaagtttcttagaaatttataatttttttaaaatatatagttttttttcaatcattatttagtgattaaacatatcaaactctaaaatatcaacatatataaatgcatgttacattatcaataaatagagatagagatatacttattacaattcgaaatcgtgctatgcaaatttgctttaactttaactatctaaaagccaaaaggttgactataagctaacattcgcttttattcatattcaataagaggatagcacgtttgaaatggcaacgaaaagaatcttgtgacaaaacaacctagtttcatatttgttcttccccagctcaaggcaaagactatttaaggtggattttggaaatctcatatgattttcttcgtactagtccagtttccatggagcacttgcaatgattttgacgattaagttagtatttgcaatagtagataaagggtgtaaatttatagagataattgtttacttgggactggaacatgttcttaggtttacttctaaaattattattgagttaggatggtgtctcttgcatgataacgcatgttaagtgtctttaaggttaatcccttgatttgcagtaaggtattaataaattgtgttcatcatctcgtgcttttgtatttgcatgaattttatatgcgtaagaatatgatcgttgaatgagaggggcattgggctatgataaggccgatgagtattagtaaaattaatttcaaatcatattaattttaattaaaaatattaagttttttttaattataaatgcaagttagtagtgaaacttagtacatgtaaaagttatctactcaaaatcaattcatcaaaagtaaaattaaataaatataaaaatttacatgaaatcacgttaactgctattgaacataattttaaaacatcccaagtgaaactaaacaaatactatatcattcaaaatctttaaacacattaaaaactcaatacatagatatacatatttttttcaaccatcgcactggcctattaaaaaattgagtttaatatattcttagtttttgcaaatataataagttttaatttaattctttaaaaatataactataactcctataatttttaattttttttaaaataatccctatctctttttttttttttttaaaggaagaagtaattacggtgttatgtaacgcatcgttgtagtccttctggcttctgatatatataacgcatcaagaatgtccttgagaataggtctgagaggaacagaggaggtaaaaccgatcgattttgacagtgtgtatggaatccaaataaaaaataactctatataactaataattatggaattgactatgtcgttgtttaaatgaaaagcgttctttaacgatcgttgtttattattgatcatttttccacaagagtcgtgtagggagtatatataagctacatatataattagggttatgataatgaaaaaagtgtgtttgggtcagccaaatagaaattgcacgtgaaaggaaggtagccaaacagcaccttcactcaaagattccgttccctaatttgtgttcacacctgacgtggctacttctatttgaaacttgtcctcagattccaggtttatacccttttcacacctaaaacctaccaactaattccagcttttattatcactttatgatccctccatatatatattttgatgaagctgtgtgtttttaagaacacatttgatcaaaatctgacatggaatataaaattaaagtttaaccgcatacttaaatagctataatttatttgtataaaaaagacaactaggtttgtctcataacataaaaaggcattttccaataaatttatagtagcatctaatttcatataaagttataacacgagcttcttgatcatttgtcacaatttgaagggaaatgaaaatgagatttgtatcctgagtttaattatataataactatttttctacatactatacaaggagaaaaaaattctttggcaacaatttatcgttgttggaaatgcccagtttcgtttttgtctatttggaaatgcctttttaagtaattaaaaataatgaaaagaatatagataattcatttaaaaaagtttacgctagattcctaccatgcccatgttcacacctgaaacaatattgaattgaacatttcattgctgtctgcatgacaaaaataataataataatttaattggtgaactttgaggggcttgacttgtgcttcgcggctgttcatggcttgcatgccactagattgcttaaagatacacaatttataaacttaaatacaattctgtaattatttttaataatattattttatttcggcaatttaaataataaatatgttcattaaaaattaatataaattactgaaataaacctttaattttaattaaaaatatttatgaaattgtatctaaatttcgtcttatcagtatttatgcttcaatattgttctacaatttttgactcattatttttttcagaaaatatctggtaattttactgtatatgcaccaaaaaaattcgccctacttggtacttgcttttcaggtataaaataataaaataaataatatattgaatagaaccttgagaagaaatatattttttgtctaaatcacaaatatcttttattagagacttagaaaaaatccttaattatagtaaagtgaaataaataacgtaattaatttaataatagtgggcttgctttttttttattagaatgcaactattttatacaaaatataatttcactcgagttaaatttaaattgatgagaaaattatttctctagagatttaactcaattatatatttaaatttagactcgaaatgatttattaaattaaaatcatcctggctaataaaaatagtgttacaaaagtcctatgaaagttaacttacgtccgtgagttactgtggatcacctggtatttgagtacgattcttttagataaataaaaaataaaaaataaaaaattattggctcattctcattatttataagacattttattgggatggcaaaagcaagtagagccgcgccagtcgaagtctaagcgtcggctagaatgtgatcccgtaagataccttgaacttgaagtccgttagagtcaaaggggcccacacttgccacctaggaaatcctacgtggcactacttaggtttgacctttcccattttctcatttaattttttcattacctatctctctatatatattggtaatatcatatcacccacttagctattactttccatcattgcaattcataaagccacacaaaacaaaatgggcaactgcttgaggcgcgaatcgcggattggatactccaccgacgaggacgaggacgaggacgaggactgggaggattttccggcggcggagagcggcggtgttaagaaaaggaggagagaggtgaagataaagataacgaagaagcagttggaggagttggttggcaaagtggaggtgaaggagttgagaatggaacaggttttggcgcacttgatgatcaatcactctcttcaacgtccatggaggcctgctcttcaaagcattccagaagatcattaacgtaattaattagatattggagcagtgtattgggcctattaattggctcaatccttccatcataaactagggttttgtttttgttctgtgcttctaggggaatgttaatattgtaaccagggtgggtggatgggtgcttacacttttttctttcttttgtaaatacaaaactttagtacccttttgatgctataccctacatatatcactattagaggttgatttatcttgatctactatcttctttttacttttctcgtccttctcaatttctatttatattattaattgatacaaaattatttcatcttaattattattttttgagaaatagacttttgctatctgaatattggtggttttacttaattagatcatgctttgtctttaatgaaagatatatgtgaattataaaaataatttcaattaaattgtttgtttgtctttctgatatgtgttactttcaagagataataatccacaataaaacaatatatttttctaataagaattcgaattttgatttacttattgtgaagaatgattcttttgctcgaccgaactccattggtatgttctgttcatgactgtatatagggatataaatttttgtgtggggttgagaaatgtgatgagattctgtaacatgtttttctatctgctccaccatacatattgtgtccagggtggccaccactttcattcttcaacttgagtggcgagtggcgtgaatgaatggttgtgagattcgctttcacaatttgttattagttttttagtctctataatagcagcattgaagttgacgagaaaaggagagttgtttttttaaggcttggtaagatcttcgaaaaggatgaaaaaattacaaatattttttttatatttctgattgatggctaatcgacttggactatgtttaccatttttttctcctaaaagctgactcattattttttacatattgtatgaagtaacgttaaacggtggattaattagggcccgcgagtaatttttattcaaacaaaaatggatatttttttcaacaaacaatgggaagctatcactttcaagatacgttgcctaatattacccacatatggttcatctttgaattagtaaaacattatgacaatggatggcagtgctgtgaatagtagtacatatatgggaattaaaacatggtagattaattgaatggggtgaagagaagcagtgcattggcaattttgaaatgagttgcactattaatttatcatacatgtcccacatgatggaaaaaaagattgatttggaaattggatctgaaagttggaccaagtacaagtcatggacccaacaccatgagattaaactgtgcaaatgctctagcctacaactaaggtttgtatcatttaatgctaagcttggagtagtaggtatgatgcctattcagcattacacactttctatatatttttctaaaatatggtgtaaaaccttccaaaattcctagggcaactaaatctctttgtcgtcactatcgaaatttggtggttgatcaatcatgaattaatgagagctttgtggatagaattacatctcaagttttgagttcacactgctcctatttcctaagtcctaccacaaatgtttgtattctagtctgccggcagtacttccaagtccaaacccaaaatatgactattataacaacaaattactattcctcaactttaaaataagtatcattttaagattatgtacaaaaatttaaaagtaattaaacactctttaattttaaaaataatttactcggattatattaccttttcattttataatattctcttattttgcttaattaatagtatataaaaactactatacatatgatttaaagtatttttttaaatgaattatttgctctcttttttaaaaaaatgacgaatgatttaaaataatttaaaattttgtgttggttatttgatataaaaagctccaaatgtcatatctgaaaaaaatttaacaaaaaaaatctacactgcaaagatacgtttatccaattcagtcaagttaggacagacattttttacataagaaaaaactacttacaggtaatctactagcattatttttttaaaatttaaagccaatttatgtatgcattttcacaggcaaaaattgagtgaatgagtcttgttataatagctttgtttaaatttatgtcacatgttcaataaagatgatttttttaaggtgactatggcattggtgtaacgataaaaatgtgattgaattgattttagtaattttattttacaataaaatatcaaaaagatttatcctccctctcccgagtatcgctaaataagttctgcagaagtacttatatggctatatttgaataatgcttttatataacttcactatagtaattttctattacaactattgacaattaataaattttgtattgaaacttattggatgtttatttattcaatgataaataatataccgatcaaaagaaattccataaggtattaaatatttttttgtagtgcaatatattttttcattggttcgtatgacgttcatatgccatatagattgcctcatcatctttaaaagaacaccctgtatacgcacacgcacacaatacgtcacccactcgatctcaatgcttacaagatgacaatctttctattggtaagtggtaaaactaacaactacaatgatattagtatagtaaacgagtaatgttcacttgacatgatataccatatcaatatcaccatcttgtaattgcttttcaaaataaaattgacttccccatcatcgtcacccatgaatatgatattgatatatatgttgcatttatcttcttgtattataaacgactgataggagtattcactaaaaaaataggagtatatattcactgcaatttgcgaatggattaaatcattattttattacaagaaaaatatcgacagatttgtgtatataattaaaaaaattcaaaattgaaacgtggttaaaaatttaaagtaataacactgacacaatgtgataatgaccttgttacagagcttttgtattgtttgtattgggtacatgcattattgaacttcataaaaattataatatttcagtacttgattttatttttttagcttatgatttcgcaataataagtactgttttaggaagagggaggaacatctcaaattgttttattttttacaaggaaattatgtatatattaaaaaaaaaaaaaaaaactttgcatgaactacaaagtgatacttagggagagtttgactactcaacagagtcttagtcatgaatgtgtgggaaaagagtaaagagaaaaaatcatgatgggatttcaacgattaagtggtgctattgaaaggagaaaaccaaagttttcatcagagttatggaggaagaatgttaggaaacacaaggaaatgcaaatgatatgtgagcgaagatgggataaagggttggaaaaatagctaaaagacacttgaagaatcaagagattggggacctgaggataaaacatcttggtgatgatggaatctagtgtataagataaagttaagattgaaatgaattgttttaaagcatgattcttgtgttagaatgctgaaaactagaaaatgtgtgatagttaagaaaagtaccaaaaaggaactgaaccaagaactaaaagcttttattcgattatgccaagccttaggtatcaaaagtggagctagagctgctacactctataggcttgctaaaattagagagaaaaagtcaagagatttggataaaaaagaagtgcattaaggatgaagacaataaaatctttgtttttgttatggaacaaaagtacaagacactatagaaagacagaaaaataacttttagaagttatttaattaagtacgtaaatttctatcaggttaaacacaagggacgaggaccaaaattatgccttttattgtaagatttgggagaaaggtatcagttggcacatttctataaaaaaaataaaaattgtttaacaaggttatgagtatgaggcccaagaaaataccagaagagtgaagcagtgatactcttagaccaaattgtaagaatattgatataaaaaagattatgcaaattattggcgatcaagatgaagttatgagaaaaaggtgattgagggaagattaagaaaaaagactcatattactaaaacgatttagatttatgcctaggaggtaaactatgcaagcaatataattgctatagcatttaatgaggagaaatcgttggaataaaaaagattttcatatgttctttattgagttagaaaagacatatgatcaaatactaagaaagatattgtggagggccataaagaagaaagaaatttgtgttggacatcttcaaacaatcaatgatatatatgaggaagttcaagactagggtgagaacacaattacacagtggaatcacaacaaaatttcttataaccataggattgggccaagggttaattttgagctcttatctctaccttagtcttaaatgtccttaaaagtgtatccaaaagtcaatacaataatatatgctttttacatatgtagttctgttggaaaatccatagatgacataaatgaaaaattgaatatcttagatattcttttcttatataaatacaatgaactcacaacttaatttttcactgtttttattaataacaatacctattttctcccaacataaatcaacatatgaaattcatgattaacaataagcttgacggctagaacaagtatttgtaaatttgtttcgagagtcgttatatactatcgttaaaagggatttatatatagtatcaaaagcattcaacactggccaaggttaaaatagtggcgtgagtttatgtagttattgcactaaaaattataaaaggaaaataagtgaaatacattaggtaaaaatctttaccaggaagagaatataaaaaaaaaaaaaaaaattgactactaattagtttctttatctagtctgccactagaggtgagtttcttataatcagtcattgtggaacgagaccaaggaactaatattacaacccaagttgccacaacaattctcatgcagaaattattcagttttattgtctgcaacaaagcaactacctttcatcaatgatgttcattcaaatccacggagattacacatgaacttggtatctcattcaaatcaacagagtgcatcatctatactcttggaagttaacatgaccagttgcttgtgcatgctccactgcctcctgaaatgttcgcaaaaaaaaaaaaaagcactcagaatcattagaacaaaggagaataggctaaggtgggtaaatagaataaagcaaagcatcaggtactgagggatcaccttctgaccaattactccaatttggcatactccacagcgcagagtgaagttagaagtgtccgtgtaactccgtttcctgagaaagtgtagccatgatatattagcatcatgggcatagcataaattgcaatgatactaagtagcagaaataattgggagaggccattcgagatgatatcgaaattaaattgagaagattaaaaaaaattacatcatgcaagataaaacaaactgacttccctttgtattattgcagagttaaaatatacgttcctactggcagacaagatacatagcccaactatctctttcacttaaaaaatgtgcataatttcacctgtattgtttgacaatagaaattggcaaagttgaagttttcaacttatcagtctatgtatatacattaacagctttgcggcacattcactatgttcttgttctaaattgataaaaggtgcactggatttgcaaaaatgtcttcttctgtttgcactaacaattacaaaaatgtcattagtttcactttattttttgtttttaaatatttgcacataaaaacatgaattgaggtgaattttgtaattattactaaaaatagaaaatatttccacaatcctccaaattcaaatgcatcccaactcctctgaaagtgaaaccttaaaatacatgcccaaaaagaagaccttttaggtaccgatattcacaacaaatctgatatataaagaatccaaatatgaagatttatgcaattcaattatctaaatatgataatatttatctctttcttttaagaaggttcaataagaatagcgaactacctctgctggtccttcacaaaatttagaacaagcccttcaacaggtccaatgcttctgtttttctgtacagcaaatatggtctgatcaaactcctcaggagcttcctcaaagggagacatctgacccatacaaggggtgtgagtaatcatcaggcaacatgaaaacaaaaatacatatgaaccttaactttttaatttgttttattgtttcatgtgtagtagataaatataaataccatatacttgtaatctcacaattcacctccaaaaccacaaaaaaaaaatgcacaaaagagaaggaatggatcaacatcaacatcaacatcaataatacaatacctttaacccaaactaattggggtcggtgaagagaaggaatggatgataaaaaaaaaatctggtatatgaaattactcaccactaatgcatcatagtggagaccatcataaatcagcatcactctttcagaataattcctttcctgtcaaaagtattcacaaaaagtgaaaatagaaaagttcagtcataagaggttgcaaaacttgagagcatatagattgcataagagtgactaacctgaccgtacaaatcacatcgagttgtctggatatcatatgctgcaatttcacgtccataataatctgctaatattgaaagttcaattgcaccttcacaaaaatatagagcttaattagcgcatcaaactaacaaaaagttaacagtgctttattgttaaatttgctagtaggagtttgaaataccctttgaaacccatgtcaaattcatcaactacaaaatctatacccaccaaatttatatcaaaagcctaattttagaaacaaaactgaaatttaaacaattgtcgcagaagattctctgggtatccagatgtttaaattaaatttcccaaattttaattaaatctttatgcctctctgcgtttcaggaaaataatatattttactcatatatactccataatatatttatcttagcaaagtttattaaaagctcagatgttaaatcaacctatctttgagtgagtttcatcaccttcaaagttccaaataaaaatgaattttccacacttgaggttacacattcatacactcaccacagtaacaccaaaagtagcagttccaatttgttgagtgaaaattggtaactatttccatctaactttttatttaaaatagccttgattacgaaaaacataggccaactaacctccccacttctccgagtcaagaatccagttacaatactctgtgtttggcttcccaagaaatgcttcacaatatttctgtggatcacttgctactgttgctgctataacctttagcatgtcaaatgacaaatagcacacaaatattaagtcaaaatatgtaagaaataatgaaataacatactcaaaatgcaaagatattaggcaatacaatggtataaaagttccacttgactggtaattcttaaatgatagactatataatttcatatctgaaaataaaaatattttgccatgacaagattttagttgcatgtaatttcatggaaagcattgagtagcacagcatggggcttgacggaccataatacaagtgcatatgatgaattgatgacaaaatatggagatctaccagagaagttacttaagtctcatgtcaggaattaaaaacaacaagagctagcgaaaaataggtatgttgagccatatataatatttcaaagtcagatttttgtaaaataaaaatgctcaaagcgcatttattagtcatagctgcatctgaaaaattcttcatgcagtatgaagataaaaaataactaaatattcaatacgacaaagatccgtaaggaagcagaggtctccggtcatgtgttgggaagcaccgctgtcaataagccaagaggaggacaatggcttattggacaaaggttcagacatgggcttgcattggtcagcaagagtcaggatacgttggatcatctcgggtcgggtgtgagatcaggaagtggcgctggtgtggaagatgatgaagccacaggaggagctggtgaagtggtatgagcaacaactgtggaatgcaggcgttcattgattttgaaggtacgtgaagaagacatggcagcggaaaaaaattggcctggaattgttaggctctgataccatgtaggaaatgttgtagattgcagcttactttattgataataggatgaatgtttatatagagccaattacaacagaaaatatgtatatcttattaggtactagatatatcttatctaatatattaatatctaagtatttcactgatccttagcatttgttgcaaccattttaatgattgaaaagccaactatcagtttgccaaaagctctttttactgaattttaataaaaatatgtctatgactacaaggaacatttcagaataaaaatatgtttttgatttctcaaaatatctagaaatttggtcttagtccctataaaaattcaacatgttttagttcttatatttattaaaagtgaagtggttttagtctcttgtcaagaactaaaaacacatgtttttgagagaaaaagtagggaataaaaatgtattaattttatagtatgcttcaacacattccaacctcatgtattcaacagtgtcatatcacacttcgagaatgacacggttggaggacctctaactagttgggtgaaaagtccttcttccaatcctgtagagaggtctcctgatttgaaaatgaattctacaatacaatgttgttaaaggaggcgtcatggcgtggcagattttttgccaaccaccataggcaattcgtgaagagaagcccaccgtggcgtgtttacatggaggaattttacccttccgccatgttctaccaccccccattgataacactactacgatatgtttcactggtccaaatcttgagtttattgtgtttgatacctcaagtttgaaaaatgatatttttctagtagaaaagatcatatatttaactttgaaatttttgttaaaatgtaggggctaaaaacatattaatctctatattttgtgggattaaaactgaatctcgatatattttgagggaccaaaaacatgttttactccaaaaataaaaacatatcttgaggcaaaagttgaccagccagaaatgaagcacccctcggcactagaagcaaattcacaaataaactgaatacaagaaaaaaattacctgtctcaactcagcagctttctttttgtcatgatccataacatatctgaaacaattaaacaaaaccaaaaggaaggagaaagaacatcacaagtggaataatttgtacaagtagcagtaattccaaaaaaaaaaagggcctgtgttccattgcttagcttacccaacagcattgaaaaggcaactgttatccgaaggaatgacccttctcagaataacaccttccatgatgcagattgtagatgacttaccaacctaaaaatcaatcacagaagaaccatattcaaaatctaaaacacaataactaaagcaacaccgcatgtgtattctgaaaagaaagggaagaaagagaaaagggtttgaattggaaaatggagatctatgctatgagaattgaaaaagggattggtctgagaagaaggagagaatgaatacgaaccaagcttgttaggtgtgttggatttggtataggtatttgaataagaaacgttttcctttcctttttatgcgtcaaaagaattaacattaacttaacgggattgctaccgttttcgttcagatgccaccgtcattttcttcgccatgccccactactctcttccatgcccaacacctagcattcgcaacatcttccctattttattctctgttatccaaaagtattattttctaaacaattttattggtatattcaccattttttctcatgattattttctcccgtctgggaaaattgtcatgtttagtggtcccaaatataattaatttcacattacttaatatttttatttaattgattcttgatatttaattttaataaaaagtattttacaaaggaaaaaaaaaaagtaaaatcggtgcaattgtttgtaactaatttttaattatcgagaatcaattattttttaatatatttaagatagcgagaataatctttatttaaaaaacagacttgcttagtgatagtaatataccccgtaaaaaaatatatagtaatatctcttcttccgatcaaatatgatattttcattcacaacatttattatatttgtaacttaaatgaatgtaccaattttgcaaagtattttaaataaaagtaatttttcatgtaaataattgaaagaaagataaaaaaaaaatatttttaaaatcattaagcatgtgaatcatctgatattagagattttgaattcaaatattgagcattggatggatagttttgtggctcaatgtaatcttatcgaatatgattatttctaatagagaatagttgtgattaaaaaaaagaattaaaagaaagttatgtcaaataatttatttttgcataaataataaataatgactcaaagatgaagaaaatttaattccaaagtttaccatcaaatcctaagaatttatattaataataaaataattaattgaatatttagagtagtctatctatagtaaaaacctttttatatgccatatatttagagaactaaaaaacaatgttttttcagcaaaagttataaccaaatgtgtactaaacatttaaagcaataaaagatgtaacttgtaagtatacaccgagtatccaatacagtgcatggatacttttttagttatataaagcatggatacttttaaatacatgtgccatcaaacaaatatttataaataaaaatagaaactattgaattaaaaatataattattaatattttaacatttttgaataattagaattagtaaaatagccttttagtttctccatatgtattttatgaaaaaaaaaaaaacattaaaagaaccgttatgtgataccgttatgtgattaccaatgcttctaaagttttattttatattttttcatgtaaacagagaagaagaaaataaaaaaacaagaataggatgcacatatcaaattttaagcatttacttgagaagagaaataaaaaaatataagtttcatgcataatcccccctagagtactgtgaaatcagggagaagtgtgttgcacttgatattttttactttttaaaaaaatattattttataacataaaaatataaataattttatatacaaattattttttactgaaatttaatttttttaattagtataatatttttgtataaataatgtctaaaaaataaagtttgataatggaaaaaataagcattaagaaaacttaattcctaagtttaggataaaatatcaagaacttatattaacaataaatagttaattgaatatttaaattagtttatctataaaaaaatctttttctataccttatttaaaaaaaattaaacataatatttatccagcaaaactacaaaagttattaccttttaaagcaatataaaacactaagtataaatcaagtgttcattacaatgcatggatatatttttttgacactgtaaatggtacaatggtaagacactccaataggtatcgggggatttcccagaagaggatcgcacacaatgacacaaagtggaaaaattgaaaaagtgacgttagaaaaattggaactcactcataaagaaggtaaaaattataaatctttaatcacttggataaattcgcattttcaaacaaatactcataaattaaaataattattgaattaaaaatacaattatttattttaatattttaatattttatattttttgcgggaagaaattttttaaataatcaataaatagtaacaaatatcatttaatttcttcgtatgtatcttatgagatgtcatcaaaaaatgttgtcatactaatagatggagaaatcctccaaatacactctttaatacatttttatgggttgtttgtaaaaaaaaaaaaaaaaatactttcttatatgattatttatgatttattgatataatttttttatatttattctctcaattacacaacaactaaatatatattctctaacacactctaatgttatgcaaatgcagaacaatcaatgggtaaattatcccccaccctcactcacataaaaaaaaaaaaaaactaaaaaaaccctcactcacatgaagaagaaaaaaagaatcaatacgtactaaaaaaaagtgggtaaattatcccccaccccaccctcactcacatgaagaagaaaaaaagaatcaatacgtacaaaaaaaagtgcatgatttctttgaataaaagcatatgcacgcatgaagatgaaatcctttcaagcgtagagataatcaaaatcccctccccaaccataaaagaatcagtgcgtagaaaaaaaggagcatgttcatcggataaaagcgtaggatataatagaatcctttcaagatgacatggaaattgcaaagtatattgaatggatcttttaatactcattttgtattaagatgacaaggcctccatagagcttacaaattaatttattcagcaagtaaaactatttattttatacggctaaaaaacactaattattgttttgtaatatagtttactcatgtacttaatggtaattttcttccaaatatcggaaaggctctttcctatgaaccctaatcaaacctgaatattatgaaaattttctgggtagctgaccctctcatttcgttcgtccaaaatccatcaaaattcattcataacatactttatctttaattgaaatagtattttctcctcttaacaggtaattttatatttgttttgttaccgatgatgggaattaatcctcgcaactcgcaagaaagggtgatagtctagccgtggaaccacatttttttatgcaatgtattcttgagaaagtatcagcaaataaatcttcttgtttgaataattttttaatatgtatttataatttataagagaataaaatgagctcttatatatatatatatatatatatatatattagaataattgattatgattgataagacatttaaggaacttataaatttttttaaataacgtataagttcctttaactaaaataagtttattggtacattaatttattttaatagcttatttttcataaactactttaaatagcttattttgataagttatttgaaatagtttatcaaaaataagataacttataagctattaattttttcttcttaattttatcattcctattttattttaccttttaattcaatttaaaaaaacccttaccttgctaaacaatatatgatttgtataatatttcatagtctttcaagtgagaaacatacacatctaagttcttcttatcaaatgaatatataagaaaaattataaaaaaacacttttcattttttgttttaaaataatattattaataaagtatttaaatgttaaaaaatgattttaaacaagagaattctaataaagtttattttatttaatgttactttaaaaaaaatcatttttttataatacaaaattttaaaaattactatcttactttttaagatgataaattattaaaaataaaatttaaatattaaaaatactaaatatatctttttacatttgatatttatcaattaatcttatcaaacattaagtcaattagcttattctaattttaccaaacatagtatttacactgtttaacttttataaaaagctcttttatttagttccttcataattaaagttgaaaactataaatcgattttgcttacagaatataaatatgatttattttatttttatttccttctgttataagtatggatagaaaattctatctaaatactgtacaaattgacacgatagagttatataattatgagaaaggcaactttatgagtaactttaatgttcgtcacttaccttaatatttttttaaaaaataacatctatgtataattacggttacttaaaaaagtaatgttgcttaattaaaaaagcaagcctcgttatatttttttatttccttttttttttcagactttgatagagggagaaaagttatagtttcactgttaaagatgttttacgttttatctttattcttgaaaactggcaaaaatcgacaaatgtttgtcgatagtttgaataattgagtgcatgtttaattttccgttcaaattattgtcttaccaattttgagacaaatccaacattccaatataaaagaaagaatcatgataagttgacaaatttacgttcttcttcaccaacatttagtcaaatatgctctaaatcgttcaactcagattgaattctttccctctttgtcaatgaaaacaagttacacattttcaatatctaaggattgccttcataaacttggttagggaagccagaattgttaacacaagaaattaaggaaaagattatagaaaaaaaacataacagcttaaatattaaggttggatttgatttaagatttcacaaattattttcagaaaagtgaatttgggaatgtcacaatctcaagtttacttcatttttttatataaaagaaaaatatatccacgtatggttgattcttaggaatataaaacattttcatgaaaataaaagttcttttctaaaataactccatattcctacttctttcttgagtttcttccacattgtttcctctactttttcttcttcaaaattttaattaaatatttttctaaaattattaaatgccaaccaaatcaaacatgtttatgaaaattacatccgtaagcatagtattcttggggataagatttttggaaatgtaatattataccttgggaaaaaaaaacctaaattaataaaatgcaaactaatttataatatcggtagagaaatttaaagtataactaatcaaatgataatgtaaacaaaattacaaaagattgaattggaaaaacaagttactaacggatactaatcaaggatcaggatcttctaaagtaaaccttctcattttagggagagaagtgaaacgggtttatctctgtcgtttaattaataaacaatctttactaattgtatattggttactttttctgttacttatatttatgaattggtcaatccatttcagtgacttatatagtacctcaaaaggaattcatatctaaccatcagccaaatgatatctttagttaaagaacaaaatatgaagaaaaagaagataatcagtacgtactataaggttttcaatgtaacgtccacaaatcaatctaaagaaaatagatgtgagttcgagtaaaagatatttattaaaaatgatcttattcatggtctgtcttatgtaatacgatgtcacaaaagctgcaaacaagaaacatccaatgactaagtttctttcacgttaaatagatgcataatctttgagagagaatccgaagattagagacctcgcttggatggtaaatgtaatcacaagagcaccattatccaaagaacaaaactaagtaaaacttcaatactaagatatgtcccttcctgcattattaacctgagtttgctgatggagccagatgtactagtacaattgatgcttatagagttgctatgcactcaatttcaatcttggcatccaatggcaatgcggctacttgataagttgaacgagcagggaaaggtgaagggaagtctgaaatcattggaaaagtaggtaaattaaaattatttaagtaactgtaggcattagtgaaaattaaataataccaacccaaagggaaaaccttaatattttcagcatgctactagtggactctctagtatcaatctagtaatcacccttagtatatattaaatatgacaagttgacaacataacctattacctattatgacaagctaacaggtgaatcttcaagactaaaccataaaaaagcatgaaggttttgaatctaaaagctggtcagtggtcagccatggtacatgtatgttacctacaggctaacacattctcagcccacaaatgcagcaggatcaatttttacagcacagtacaaattattatcagaagtgaaattcattagtaattagcacagttaagcagtttgtcaatacaggactttcatgatctgcaatatgaaatggattcacatctaaacaagttagtgcaagcttcgccttctacaagaatgtaactgtcaaggaaacattaaaaattaaaatcactaccacagaactcacatttagcatagatctcattaactttcttgaagtccttcaagtcagccaacctgcaggaaataaaaactcaaaaactagtaatcttgctgaaacgcaataaaccccaaccacaaatgagtgaggaattcatacataattgtcgtcttaacgaccgacgagtaactagcaccaccggctttaagaatttcccccatgtttttaagaagctacaaagggtaattatatcaaatgtcagcaacaaaatcaacaagtgcattgcaacatcaataaaatgttaccatcatacaatacaacaattgacattcaaagaatgtaatatcacaagacaaaatgttgtctcattctgtacctgttcagtttggtcttcaacatcatcagatacgaacttcccggtctgcattgaagagcaaaacacacatcaacaatctgaagaaacgaacatcataaactaaaggaagtgataacaattaagtgaattaaaaaaacctcgggaacaaggccaagaacaccagacacaaaaagaaggttgttggatttgattgcttgagaatatggtcccagagccgcaggtgccccttcggtttgaacactttccttaatacctacaaacaataaggatcaccattataacaaaaaagtaaaagcttaaaaatttgaaggtttcttcataatgggtacttacgagtttcggaagaaatgctcaagcatgtgaatggcaaagagtgcctcggtgacgaagaggagcgccagaaggaggtgccgaccaccgacaaacaccctactccggcggccaatgaagcacggttgcgcagtgcgctgccttccatcgccggaatctggaagctccgagcaccgcaccacgacgccatttctatatctctgactgactctaccttacactctcactctgtcaaagtcttcaaccttggagtttgtttttggggtctttgctgcaacagtcacttctttttaccaaaactacccttatctcaggcactcatttaccattttggtcccttaaaatggatgggctccaagggttcatgggctgggcccatccttcaccctaataacagttttgattaggcccatgttatttacatacatcttttctctaagttcgcacttttttttagttttcaaaaagactataggcaattgttaaacatatctcccataaatattagatataccttttttttttgttattaaatttacttaaatatccagatctcttatctctcaatcctttctccttcaagcctttctattttatagtacataattgagaaaggttaaaaaaaaaaggaatgagaagtaaaggtgaagatatttaataaatttaataacaaaaaataaaacaatgttgtacataatgttgagtcatgcaataatttatatatatggtttggattaataaaacaattgtgtgtgaaacagaatcagaacatacaaagaaaaggatgagtagcataatcattgttgtggaccaaaaaaggaaggagaaggaaagatatattgaatcagtcaaccatgacatgaaaaataaagaaaaaagagatgaaacctttgatatagctaaattggtcttcatattaaaatttgactctgaatctgatgatgataaggatgatgagccatattcaccaaatcaagaccagaaagagacccaattacaaaacaattaagaaaatgaaatcatcaacttatgaaacctatccaagttaatggcattagcttcttgagtgttctgtagttgggtttgttcttagtcttggtttgacaacatgactcatcatacttgtcattatcttattcagagtcatattctaatctgaagaccaattcagctaaatcaatggtttcatatctttttcctttgttttttatgccatggttggctgattcaatatggctttccttctccttcctttttggtccaaagcaatgattttgccactcatcctcctctttgtatgctcttattcattttcatacacaattattttattaatccaaaccatatatataaactaagacataacttaacattatatatggcattatcatacaatgtatatctagcattagatttaaaagacatgcttctttagctttatttacatatgtaatttaaatatcaatatttattattttatcctcataaagatattttcactaaatacgctcttagattacacacacagttacactactacatctcccttattatgtcgattatttggggttttctatattgctatacgaatcagctaatgtaaaatgttagaatttttcaaattaattatgttagaatggatgtaattttttttacatcatttctaaatagaatcgatgtaatacgtgccaatttccaaagcaaaattctctcacaccagaaatctaaaccaaagcacaaaacaaacaacaactcttcaaacaaagtcccaaattgaatcaacagaaaaaaaaaaacctattaaaaccaaaacacaacaaaaatcaatcaatcagtcaaaaataatatattacctaaatgaaaaagacaagacatggaaaaaagacaattgagtatcaaaatagtgttacctctacagagaattgcacgatgaaattgccaaatctatgtgtgatggaagggaaccctagtgggtgcatggaagatggagtgagggagaggcagtccagatccactctaccactaaggtatcaaccatcgttcggaataattgttccatcttgtgttgcaacaatcactcaatcaatagaaaaacaaacaatgctccaaaaaaatactaattgaatcaacacaaaaggatttgttgaagccaaaaacacaacaaaagtcaaacaattaccgagacgcaatagaattccaaaatgaaaaagacaaggcgtggaacaaaaaatggaaattttgtacacaattaagttatcgaaacgatgttacctccattgagaattgtgtgacaaagttgcaagatgtgatggaaggaaaccctagcaagtgtgaaggagaggcatactgagatccacacctccatcgaggcaccaactactgcctataactggcattccattttgtgtcacaacatgcataagatcaatgcaaaaacaaacaatgctccaaaaatcccaatcaactcaacacaaaaaagtatccgctgaagtcaaaacaccaaaaaaatataaataaaacaatcgctcaaaagcaatagattacctaaatgaaaaatacaatacatggaataaaagatgggaaatttaaagtatatagttgagttatcaaaatagtgttacctcaatatagaattgcttgatgaagtgttgaagtcaagaagtgagatccagatccaaattgcactgaagcaacaactgtcacccacaatcactgctctatctggtgcagtagccaatgctattagaatcacaatccagattgtaggaacgtgcgattcaacgatttttgaagacatctctgtgttgcatcgtcgttaggatcgttggagtgcgagatcagattaaatttgcactctttcatgtgggatatacaatcctatctaaacaatttaggtgagcaaataaaggtattttgcgagctttgtggggactctttcgtgtcgttgttgttgtgttgttgccaaacaacctctgttcttacagtcgctaacctcctagtactcttctatctacgctctctgtctaccataaggaattagggttgcacttgttcttggacttttacagcagtggctgatgacacttagcatttataggagaaacatgtaggtcgtagggtttcaagggaattgggccaaattttttctttattttatttttcatatttgatttcttgggccttaattaaagtccaatttagtttttttaaaatgtaaaatattacatataatataataaataaagaagaagaataagaagaaatataatagtattataagtgtaattaacaaaaaataaaacataacaaagaatataataatatgataaactaaaaaacataatatatgatataagaaattaaagaaaaataaaagttatatattatttataagtattttaggaaaggaaatgtaggatcttatgatccaaatcacatttttccccactcaatcctagataagatcttgatttcaacagccatggtaacaacaaacaccaaattgaaggataaagtgtaaaagggtttaatcgagtaacactataaacactaaatctaaaatatctctccatgtaaaaccaaggttatggtgaagatgcatcaaaatccaactttgctctgcacaagagcaaggttgtaacaaggatgagttgaggtgaggcaaagatgcattagggttaggtgatatccaaccaatggctttgggtaccgtcttcatgtggcagagaaagtgttaaggcaagagggagaaaagagtatcatcctcaaaaaggagatccaatcatctcaaaattgctctatcaattttgaaacctcaaagaataaacattattatataaagcaaacaactcttacaatactgtgggcaaagtgggtttagaacgtagtaatcaatggattattatatagagcggacaactcctataatattatggtcaaagtgattttagaatgtaaaaatcaatgagtaattatcatatgataagttggacgttggttacaatcatgagtgatatatatgatcaatttatacaataaaatcataagataaatggtttttgtttcgggagggttcatataacatattaattgagaagtcattcaatttaatcttataacttcgtcaaatagatattctctaatattttcaaagaaactgatatattgttcaataaagtatttaatttattgacgttgaataaataaaaaacaatttaaaaaattgctataaaagcatagaaatataaagtaaataataggaccctagtgataattttggataaaaaaagaaagttgaaattttcatttaaggatattctcttattagagtttttattttcaagaaaaaatatatctttcccattatttcttattctcttttagaaaataaattgctttatttataaataaaaatttaacatctctttccttttcctcttgatgtcttcaccaaaagatacctcaaatacttgtttttagattgttaacaatattttatttattcacattaactagttaataaattatttaaaagtttgctatgaatgaataggaacaaaatgcagattataagatcctagtaataattttggataagaaaggaaggaaggcataatttttatttacagaaaatattctattacttgagatttttttataaaaattatcatatcacttttccatttttcttgcttgtttgtggaaaataatttattttttatctataaataaaaatttaacagctctttccttttcctcctaattttttcataaatagatgcaacaacgctttgtttttagattgttagaaaaccattcgtttaatgttattaatagttaaacttttttaagtttgctatatgtaaaagcattggaacaaaatcaagtaatttctacgatcctagaaataaatttagataaaaaggaaaggcgaaattttaattcaaagtaaatattatattaattaatatatatttttacaatattagataactttcctgttattccttattctctcttaaaatataatttttttgttgttaaataaaattttaatttgtctttccttttcctcctagattcttcatgaaaagataggtaattttttttttttagattgttataattttttttattcattcacattaattagttaaaaaaattaaaaggttaatatgaaagcataggaataaaaagtaaataataaaatcctagtgataattataaataaaatataaaggaagataaaataattaaattttaaataaatattttattatgatttatttcaaaataaaatattatatagctttccctttatttattattttctttaataaaataaattatttttttatttgtaaatataaatttaacatctattttctcttcttcctaatttattcatgaaaagataccttaaattttttttttaagatttttataatttttttcacatttattagttaaaaaataatttgatttttttttatcgaattataagaataaaaagtaaataataagatcctaatatgataatttcagataaaaataaaggaaggtaaaattttcatttaaagtaaatattctactatttcagttttctagttttttttttttttttaaagtttcgtcttattatttattctcatttaaaagtatatttttttaattggaaaagtttaacacctctctcctcttcgtcctacttttttttattaatatatatatatatatatatatctgtgtgtgtgcacaataaaaaaattaatatgtacaaactgaatttggttccattcttctcaagtgtagagacagtttattctatattaacaactattctgttaattacattagaagagaaacgaattatgttactcattattttgctaaagtgtatgttgttaagatttcatgccagttaatatatatttttattttattttagtgcaacttgtattgagactcttatttagaatcaaatgatataagcttcttccagtaataagaagataggataaagtctctctccctctatatgtatattataatttatatattttatatataattataattttaaaaatcttatttttttataattttaagaaaagtagctatataaataaaataataattttgtataacaataatttattttatttgttatctagtgtgtattaaatattaaataggattagagttaattgtattattttgttattctatgccatggtcctcatcatcatgcattgccattccgaacttgttcaggtggacgattctggaaattgttcacgttgttgaccctcactggaaaaatgggatacaaaagggtattttgaataacaaaataaaaaagaaaaagaaaaagagaggtaaatagagtaattggcagaggtaaattttattaatagcctttaccattgggtcgacctctttttttttttttttttttttttttttcttataaagtttttaggtaagggattgggctgacctctataactgtcttttttattatataaattattttaaaaagtttaaaatgataagttgagtaattaattactttataaaaaaaagcatagttaacacgctctaatttggcaataactttaatagattactatttacaattgaatacatcacagaaattttaattcattttagtaaaaaaaacattccatatctgatttaaagcctagaaaacacactatttatcttttgtcttttcactatacaaactccatatgtactacatggtaggatggtcatcaactccccaattcaataaattttaactaattttagtataaaaaaactcaaattgatttaaatcattattttggttcaaattgaaaaaaatgaaaatttgatcaatttaatttaagtctcgaattttgatttaaagaactgaacatatctaatctatccgattaaattaaatgatacataatatctttatatatattaatgcagagaaaacactccacatctgaatttgaaagttatctatataaagataaggggcaaaaactctattttagtggattttttttatacatattttaagtttactttgaataaaaagtattttttaggtaattataattataatttataaagatgacgtcaatcacaatattggatgtggagaggaaggaaaaataataataaaaccctatcttatgatatgtagaaaaagataataaagtaaatttaataaatattttggaataaaaatgataaaatataagaaggtaaaaatcaaaatgttatattttattaaaataagtttgtttaccaaagactattaatgcgatcaagcaaactttttttaactaataaaaaaattaaaaattaacttaaaatacttgttaaacatattaaagaaaggaactcataaaaaataatgaaaaaattacttatttattgtttgtagttacataaattttatcctttaatctctatacttaaaaatcatatcgttttatctttgcacaaatactttcaaatctctcttagtccctgccattatacaaactttattttttagtcattgctatttataacgacaactacaatatgaaaatacttgtataaagactaaaaatattggttttatagatagaaaataaaaggtaaagtttggattaaatgattaattttttcaaaaataaatatataattaatgagtcttgcactgaattaaaatgaattttgatttgataaaaaaacgagcctttctctttttatcaatatttatgtcctattaattaatcgcatgttgtatggatttaatcaatcaatcaaatgaggccttcattcaaaaaagtaagagcaatgaaaacatatgttagcacagagatcttccacctatggatggtgaagctatgcgtttattcattttcacgtatcaactgccaaaacagaaagaaggagagggttactgactttaatcttaattagccaatcattgatttggaataggaatattgacaattgttataaattgaaaatgagagtaaggaatagaaagacctacgactacgagggagaatgggagtgggagatgaaaacttcagagtttagctttattttccgctcattaatttagttttaaaactggttatttatttcttacatattttatttacttatttattattgatgtgacatcatatattcactgttggtctatttctgtgttaaaaaatcagtttaattgtatattgttgtggcaaccatatatttatcacactattccaggacaagattttcgtatttctggggagttgagaagtggcaacttcattcctcacttccacgatattatcagaaattaaatgtgttactactattgcgttttgatcatcaaaattattgtcccaactgaaatttgttatcagtcttttcataccttacataaaatgtgtttaggttgtttaaaagatggttttgggccttttttgggttcacaacttaaattttaagttctactggcccaaccaaaaagttcaatatacctgcctgtttagtggaagaagcatttttgttattggttatgtttcgttgtgtttttcttcttcttttatttcagtaaacctttaattcagtctttcaagtattattctctcttcttaatagtccttgaactaatgaaattatataaataatccttagaatattgaattagcataaatttattccatatattaacatgttttactaacgtccaagaattaatttgaaatattttttataattgggaattatgtaatacaatttttaatacctgagggattagttttataatttctttactttaggaactatttagcagaaacaataatactgtaggaataaaattgttgttttattctttttaatttcttcaattaatcttagtatgccgtttaatttatcttctcttgcacacgtagcccgattatatatatattcgcaccacatcataactagtacgttaattttattcttattttttatttttttgtatttaatgtaatgaactaatataaataatgttatattataattttgataattttatcttttaaagaaatgatatttaatgagaataagagaaagtgtcaacattttgtcaatattagaagagttatcataatataataaagataaaaatgaaaaaaaagttagacctaactttttttttttgtttcaaagaattagaaacctatgaacttaaacgttcataaaataacatttcaacaaatattacaaactaataaaataaccacttttacaaactcctgacaatttctcaagatcaggtgaagtgccacatgttttttgggtaaatgtgttacacgtttgtattaggttattagccattagctattagcacttagctgaaaagatattttaaagtgaaatgaaagattccaaaaatcaaaagtgtgattctcattgttgataacaatattactaattttacactttttttaatttctttttttctttatttctctaccgtacctctctttttcttatataacattacattactccttataatttttacttctctttacgtatttttttatatctttcactagatttttcttttatacatgtatctttcactagatgtatacacccaataaatttattatgataatttttatcatgatttggttaatttattgtttttttaataaagtaattacctctggcagtacaaaataattatggattcaaatttctctcaacaataaaaattaacaaactaacaattaatatttgttaaaaaataaacactaacttcaatcaataatggcaattttcttggaagttatcaaaatagaatagcatgtgaaatgctaaatagtcaacttatggcattttagttagcaaaaagatttgtataagacgagggaggaaatagcactgtcccttaattggtatcacttttaacagactcacttcagccacaaatttgctcccattacatagggtagattcatgggacatagctctacaaagacattgcagccttggtcttttgcttgcctttataaacataataattaacataagtatgtttttgttaagattttttttttttataattttgacgatttaaaaaagaatactaagattttgttttttccccctaattaaagaaaccccaaacatgtacataaggacactcaactgactcaagtattcatccaaccaaaactataacacaacaaaataaaatcggcatctccacaaaataaaggttgctttagcaactcaactagccaagcgggctaggaaagttaattgtgacttgaaagctaagttcttttgtagcttcaaaaacttaaacatagctttattattgtcacagaagaattaagaaaagcaaaaccactttgtaaataattaacccaaaaatgaggaggccgggagggggaagaaagggcataaccttttcctttacccaaaaagatatgtgaaagtaaattcatctttagtatccaaaaaaacgtgctccattttttaaggctttatgtgattaggtccacggttgtgtatcaccatctttagcatcggacaattatagttctttgtgtgtatttctcttttacctcaataattattcatctaacaaataacttaatttacaattatcaatacaaaaattaatcctacaaaaaggagataaaaaattaataaagaataacttttgttttacaaaattatcttacattttcataaatataaaggtgagaatgtttattcccatatttaataagaaattatcagaaaatattcatgaatatcttttattcccaaaaactgtaaaactgggcacaaaataaaataatagtgtttgagattctctattgaattacaagctaaagaataaactacaaaggtagcttcttttttttctcaagaaagttacattcctatgtctacaacttttcttcccattctaatgggatgagaaagctccaaattgacttttatttatcatttattaatctgaaaaaaaccaatcacgctccaataaaaaatctcgatatcatattcgtttagaagaaaaacaaaaattgccttcaatattattagaaatgttaaaagttaaccaaacatatttttatatatgcttaggaataacattcctcactacaaatttatgggaacgtaatttctaaaaatacaagataattccataaaaaaataccctaagtattatttacaaagaaaaacttgaaaactaaacattttcataatgttgtatactgacaaataattttttttttcctgttaaagtaataattacttcaaaattaagaaatatcaagttaacacggtcaatgtagtagttagatttaaagtcccaataaattgttattcagagctatgatttaattaatttagtacataaaaactaaaacttgataaaatcatttattaagaaagtctagttcaattatttgagtaagatttatgagttatgataaatcttttaatatcaccttctattactgtggatgaaaaaaacattttatagtttaaaaattataaagtaggattttatttgaagtgttccttaaagcaacgcgtattgtgtatattttccttccatttcttatcattttagcatgaaaatattttttagtgtggcgcgcctacaattttttaatttctctccttattaattaaacttaatcaaataattcaactttttttaattttccatctaatttcatctctcttgacattttttttttttacctatttcacttctattaaataaagtgcaaggaaagttaggaaacgcttagattgtgttctctcacgttaatttctttactcagtgtttctaataaagcaaaagtgcgagaattattttaattgaaacatagaatctgttgggggtctgagaatttgaccagaaagtgtatgatttgaatgaaataaaaaccgtgaatgagttgcttgctcgtgtacacgttttcttgcttcagagttaactactacgcaaatgataataattatatattgtctcgtgtccacgtttcatgatttacatttcacatgtgtcctatttcatttgatgatcatatttttccaattaatttccatcatatcaccgtcatcaagcacattatttttctcttttagttacgagtagatttcttttatttgtgattagcatattcggcgaaggagaaaaaacaagagaaaaaaatgaataaaaaagaaaagaaaaggaattcattaattttatttgatttttttaaaaaataaatatattttttcttcataaatattataaaaataaaatgcattgcaaggattattttttgaatttttttccctattcttccatcacacttcctcttatgggagggaaaaaaattgaagcaagattcacacttgttttttttctttgttttcttcttatttcaaacagaaaaaattacctcttattgatactgtatcttagaatataagatacccatcaaaatatgtacattaaatatgctctaattagaagggggagttgtgtggattttaatatgtttttcaaagataatttaaattattcaatataattttaaaatgtaattatatattaaaaagtatttatttattataatttagttataatacacttaataaattataaatatttttttattataaattataattttataagaataaatatttatctaatacaaatttagcttgtataatatttcatctaaaatgctagtttttgttttattttttgaggtaaaatagagactaactataactagatattgacatttcaattatgttgacaccttaataatctaactaaaccagctagccttaaaatgtattaaaagatgacaaaaggtccgtacaaacatgggagacaaacacggaagataaacctaaacgtatgaaaactaacgagataaactctatttaaacctaaagttaggagaagtgtttctatcctttatggtttttgttttgttttcttattacttgttaattatgttgttttaattgattgacaatttaaatgaaaataaaagagttaaatatataatttaggctctccaaaaattcattgaatttggttttatttcttgaatttttttaaaataggtgaattcagtctctcatcctaactttattaatattttgttggcatgactaataacgatcatatggatatcatatgtttgccatgtgacattaaaaaccttttttttaaaaaaaaaaaaaactaaatctaattttgatcaaatatttaaagatgaaaatcacaattttaaaatgcatttaaggttaattttgactaaaatttcaggaaccaaaaacacattttataacaataataataatttctcggcacacttgtcatttttttaatattgagaaaatgctctacaaccaaaacaattttttagtatgacttcatgagaattatttttattggaaaataaaataaaacacttacaaataaatgtaacgtctaaattattagaataatgtctcacactttatcgaaggaagcataattttttcattgaagaccccagagtggcatgctgatcctgagttcttacgcaggattcaatttgaggaattgttgatttctacttaaagatgtatgttaatttaattttagaagattttcaacttcaaaagaattaagtgtattgcacacatttccttttttgttaaattaaggatcatttaagtcaacctttatataatagaggcacatgaaaatataatattgtattaaattaataattaatgatttccaataatgtaattgccaaaataaagagatatgagcaatattatttatgattatatatttttatgatctataaggaatctataatgctatttatgaaaattataaaatttgattttgaatccatagaattgtgcacatactaagatacacacatagtatctccatagcgttttttttatttattctgacctccacagctatttaatgatttggttaatttacaaatatatttttcaacattcttttatcaatggttcttttctcttgacacaatgatcttaagtgcgaagcttatactatctcagataaattttttcattacgcttattggaaatgcaaaagtctatccaaatacgaacatgagagcagcatcaccttagtccttgaagaacataaaaaatacaaaaataaaaaccttagacaaaataatttttttttggttactcattaacaaaaattaggtggcagcatgtggtgaacgaatcaggagaaaaatgcggtgttggatacgcatctctgattcggtccttgaatcataagaaagaatgaatcaaggaagtttttcttctattatatggactccctccaaggctctaaccttgttttggtcgtaaaatagtttcaacccttttttagttaactcgttaaaatccgaatcccacagttgactcggttctatctttatcctttttgttgagattctttctttctactttcctctcctcctttaaaaaaccacatattctgatccattctgcatcaacctttgtcttctcctcccccctccccccttttctctctcttcacacttcaatggatattctttcttgaattctcttctgggttcattccctttttcattctttgactgaatcttcacactttcaagtagttggttgtgtggtggtacctgataaaacttaaaaaatctcttcccttttggtgtcagaaccatgggttgttgtctgagtaaaaaagggtcagagccagaagaacacattggttacagacatgttgccggtgctgggggtgctggtgtgtacaacaatcacaagagccatgaaccctttgccacccaaaccaaacccccttctcaccaaccataccaattacatgagaaacatgctcctcctcaggcaccctggaggcctccaccaagcccaaaacatgttcacaagcatgacacaatcactgggaagccatttgaggatgtaaagcagcacttcacacttgggaaggaattggggagaggccaatttggggttacttatctctgcactgagaattcaactggcctgcagtatgcctgcaagtccatttcaaggaggaagcttgtgagcagagctgacaaggaggacatgaagagggagattcaaatcatgcagcatttgagtggacagtccaacattgtggagttcaaaggtgcttttgaggataaacaatcagttcatgtggttatggagctgtgtgcaggaggtgaactttttgacaggattattgccaagggccactacagtgaaagggctgctgcttcaatatgtagacagattgttaaggttgttaacacctgccattttatgggtgtcattcatagggatctcaagccagagaatttcttgctatccagtaaggatgacaagggacatctcaaggccacagattttggcttgtcagtcttcattgaagaaggtatattttgttatccattcattggtcttttcttatgaatttttaatagttgtggggattcctgaaaggtaagtatgtgaactgtagcatagttgtgaataatcttctaaagtttttgaggaaaattttgtataatttccatccattttttttttttgtttttttttgtgtgtgtttgtgtaaggggagagggggggggggggggggggggaattggatgcaaaaggcatgtaagattgaaaatgatttttctattaagttctaatagtgcattgccaatgcttgacatcaatggcctgattgtcaagacttgcaaagtttgagtagcttttaatttgtttcatgggattttttttttctccctcaagatgtttatttgaataaacttctgccaactaatttttctaaagctttatctcctttttcttttttctccatatctatgcatgcactttatcacatttcagtagatggacatctttgccactcaatttgtgccatgatttatgaattaatttttttgcaagtatggagatggaaattgtaaagtgatggcttgttagaaagggtttatctactgttaatttaaagtaaattaagtttacgaaattgacggttgataaacctcgcttacttattttatacatcatctcacttgtataaaacatactaagttttttctattaattctttattcttcacaggaaaggtgtatcgagatatagttggcagtgcttactatgttgctccagaagttctacgtcgtagctatgggaaggaagcagatatatggagtgccggagttatattgtatatcttacttagcggcgtaccaccattttgggcaggtaaactctgagtttgatatgttgataataggataatttccttgtattagaggctagcctccccctgttttacagttgactattttttaataaaatatgtgatgtagagacggaaaagggaatatttgatgccatattgcaaggtcatattgattttgaaagtaatccatggccaagcatatcaaacagtgctaaagaccttgttcgcaaaatgcttataaaggatccaaagaaacgcattactgctgctcaggttctaggtaggagacttttattgtgttttctcctcattgatagtttgaatttctttcctacttgatccttttatgtgtgtacttgggtgaggttgagaagatagatcactaaaggggcttagatatattccagttctgttagcaacccaaagattgattttatttattgaatgaaaacgaaccgaaacatggattctcctctaaggattccccctttcttacaagcttgttaattctctgaatgaatcctttcacagtttcacccttcaccatatttatctaattgatcccctccaactaattactctagttcccaactaattttcccttcacttctatctaacacataacaaggctagtggatatagttattactaatagtaatgttgcatataaaaactgaatttagggcttaaaaacttatacgtgccaagatctttccatctgtatagattattctatacccatataggtgtgacaacgacaaccaatgatgcatttgaacatgttagttgctgagactagggacttttcagagacaatattttcacaaatatactgtttcttctattatctatcctttaaacatgtcagttgtttagttataggacattctgtatgtgatagaaaatgaaacattattgaacacgagggaagctagtaacagtgtgtgtctttgtcttgatgcagtgactcaaaactgtttcccgttaatattactgctgactgatagcttgattgcagcatccttaagaattttttggttcatgaattatattttctttactaattgattccttgtattgtttaaatatttagagcacccatggcttaaagaaggtggaaatgcttctgacaagccaatagacagtgcagtgctttccagaatgaagcaattcagagcaatgaataaactaaaaaaactagccctcaaggttagtcaagccacaagctgcatgaagtgaccacaatgctcttttatgcttattgtatttgatggcataattaaacattgagagacataattttttttccagtgttctcataatgactttaaattgctcgactgtgtgtaactatagggtgtaggggtacatatctctaccaattcgaaaataaactgagtggacttaaataatcgttttaggtcattgctgaaaatctttctgaagaagagatccaaggtttaaaggcaatgttcacaaatattgatactgacaatagtggtacaatcacctatgaggaactgagggcaggattgcaaagactaggctcaaagcttactgaagctgaagtgcgacagcttatggatgccgtaagctattgttgaattcacaagatttgccctcctttactttttctatattctttcaagcttacactcctttgcttaaatttaggctgatgtagatggaaatggcacaattgactacatagaattcatcactgctacaatgcatagacacaggttagaaagagatgagcatctttacaaggccttccaatattttgacaaagacgacagcgggtaaatccatctactgtgaattaacatttcttcctcaatctgtcacattatggaagtaattcttttttcctactatgcattctcaacctcaattttgaagtccatgccttccatattaatcttttgactattggattatgttttcagtttttttaataagtatttaacaagatcatataccataaatcctatttcttcctacacccaaaagcacatacattacagaatcattaaataatgaatagctctatttagaatttaaagagtaatgacacatgcaccctgatttttgtttgattccatcacaggtatatcacaagagatgaactggaaacagccatgaaggagtatggtatgggtgacgaggccacaatcagggaaattatatccgaagttgacgcagataatgtaagcctgtttttctttttgcttactacaattttgtactctagttctatccatagttgacactcaattttgtggtttctcaggatggtagaatcaactatgaagaattttgtaccatgatgaggagtggaacccaacaacaaggcaagctattctgatgtctctagattgtgtgtcctgcagccaagatgggtgcttgcttcagataaaggcttccaagagttaatattcatcttagacatgtaaagcttgtagtttagatttgttttgagttacatgctccgcgtgacttgtggtcaactcttatttctctttttggtttccttttcactttgaagtttattattgagtccacatgtaatttattaggcacactaataataaatggacttgcctagggaaggtggttttccaagttagattctacagtttgttaaattgaaatcctcatcccgtcatccggtgtcctttcttaagaattgcactttcactgatgaaatatttattgggtgccaaaaggcgaaatatttttgttgctggttatgatttctagcccttcgttttcttcttgaagcgatattggttggcctacggtttgtggttagtgccatgtctgatgacaaccacgtggagtcatgccgggttatctaagggtgattgcagattagatgaattgaaattagttttgaagagaaaaattctgatctaatcttatcagtagttatttactttaacatttaatgtgttgaatttaagtttaaatctaatctaattttaaagtagtttggattgacaaacccaagttagtaacatgcttgtcatcaaattcccaccattgcccagtgttttttcatccttgatatggggaatgtagtgaccactattaacagcagttcctttgtgaatagtacaagtgacaagttgtgtgccaattctaacagaaacagctcagagttcagacaatctatatgtgaatatatcatcctagaagacaccagaaatacaaaatgcagaaatagaaacaagaaagcaaagtgctctaataaccctgcatgtgaaaaactgatcaaatgtgccaatgtgagacttgattcctttgaaacttccaaaatacactcaaaacatccaacacaaatttgggtagcttgctgaaaatataactatcagtcattaaagtgatagagaagcataaatttgtaacgttaaatggggtagcacgtgctggtttggatcaccaaaccagtgagtcccactttcaagaaaatgtcggaagtttagtccattagaagtttcaacacaaaaaagccaaggttccttaatccaatgaataattatttttgctaaaccaagtcatacccaaatgagtctagattttatgctgtctttggttgaaaggatgaaaacagagaagatggaaaaaaaaaatagatatttgaattaaagtagaatgtacgagattcgcatgtgagtcacaatttttctctttctattatgcttcccctcttctcaaccaaacaacaaattttggaatgtccaagtacccacatcttagtgcatgtttagatgagcgttgacaaaattaattttaagtgaaattgttttgacaaaattgatttttggttaaaaataattctaaaactatgatttatgtttgaaagtttttattataaattaggaataaaactttatataaaatttgttgatcccatgcaaaagatatcaaaagttgtttcaactccattaattttggattcacagtcaattctaaactcctatttaatatgaaaaaatatctgaaatttatctaaaatcaatttaaaactcaatcaattctactgtgtatcaaataaaaagaggttaataatagataccatataccaacatgatcaactagcctatttaaaggtattgtttgacaaatataatccttaatctatattagcatttagaattgttgattgaatccggttggcaaacaggaacatatatcatgggtttcgatatggagttggtctggtccataactccagtaactgatattgataacatttggatggtcaaccagtctcttaaagcaataactcttcacttggtagaactgttgaagattgaagcagcattgttgcagtcccagtttgtcacaaaagtgaaggctacagactatccctcacaattgaaaataaagtcctacaaacaataaaaatatttacttatcaacttaatctaatgaatcatatcaatagaaatattttataaagtatattagcaataataattttttataagaaaaagtctattcacgtatacaaacaatattataaaaaaatacataatttaaattataaaagcgaaggcataatttaaataaataaattatttcttaaacacgttatgccttgaacaatatgtaatttcaaatttgagaaattttttcttaattttaaaattttatttataattatagtgtgattttaattttaaacttttgataaattgtatcaaactgaatatgtctatctttttaaatactctgaatattaatattacagtaatatttatcaatcttaattaaaattgtattcttaaaattaaaattataaatccaataacaacaaaatcttatgattgattaaaattaacgtgttttatttgttttaaatgaagttattatttaaaataaaatactctataactttacatcaccaaaacaaattattttgaaatttaaattatattttctaaattcaaattacaatcttgtatatatttcaatttcaatgcaattaaaaaaaattaggtagaagattataaaaaaagaaagaatataaatataattttacttgataatttcgcatcatttaataaaagaaagaatatacaatattaaatttgagtaaaatttagttatcttatcaatatctataggagggtatctacacaatattatattagatcagattttactatcataattatcttatcattcatctttattacgttttctatacacaatctttatgttacacaacagttatatctgtattcttgtggcgggaagtttgaaatataccaaaaatattttataaaatatattagtaataatattttttttctaagaaaaagtctaatcacgtacaaaaacaatattataaaaaaatacataatttaaattataaaaacgaacacataatttaaataaatcaattatttcttaaacaagttatgccttgaacaatatgtaatttcacattgagaaattttttgttaattttaaatttttatttataatttttatttttaaaattattaatcgttattataattttaattttaaacttttgataaattttatcaaactgaatatgtctatctttttaaatactctgaatattaatattacagtaatatttatcaatcttaattaaaattgtattcttaaaattaaaattataaatccaataacaacaaaatcttatgattgattaaaattaacgtgttttatttgttttaaataaagttattatttaaaataaaatactctataactttacatcaccaaaacatattattttgaaatttaaattatattttctaaattcgaattacaatcttgtatatatttcaatttcaatgcaattaaaaaaaatagatagaagattataaaaaaacaaagaatataaatataattttacttgacaatattacattataataaaatttagttatcttgtgaccttatctacacaatattatattagatcagattttactatcataattatatattatcttatgatttatctttattaagtttttttacacaatctttcggttacagagtagttatatctacattagagtggcaaacggtgctgattatctttttacatccgtgtatatattagagaggtgaaggaggataataggagatcattagaaaaagaaagaaatcttataatctgcaaaagtgcaacttgggaatgggtactgcaggtggaaagaaagaattcgggcatggagaagattcatcagcttctattccaatgaagacggtggttcgtgactttgttgcagcaaaagaaaagcacctgcggcatcctgaaatgggtgcaaagatcagtctcgaaagaaaagtcgaaaaagaattagaaaataattataacccatcaaagagagccaaaagcgaatgcgaaggggctagttcttcacaacatggcaaatcaaagtttgaatatttactagatgtagtggcggccttatttactgcatatgaagaagaacaagatcgcttccaagaaagggaagatgctagaaacgaaagaaatgtgggttatgagcaagggccacctgatgaacttgatggattgccaagggaatttcaagaaaagatccaagagttgaatggatgtgacgtgcagtttgtgacgcagaaggaacttttcaaaacagacttgaacccacagcaagctcgcttgtcgatcccaccttcaaagattgccaacagatttctgacaccacctgaggagtcttccttaaacgagcgtcgaggtataaataggaggctttctggcatgccagtgatggtgttggatccgtctttgagagagtacaacatgtgcttcaagaagtgggaaatggagagaagctacgtctacaacttgaccaagggatggaacgagattgtgtgtcacaatgatctaaaacttggtgatacgctgcatctttggtccttcagactctcctctaagctctgttttgcactagttaagaatcaagttgtgaatacatccgtggcaggatcatgatttcaaaatataatcttcaaattagatttagttactttgggaggttatattttgtttaccgtttctgttattcagttttagttattaaactagttttattctaatttttgaaattattcatgttctttatacttattctagtcaataaattattgaaaaggttaaaaatataatgttagaagctgaattcagagttgtaaagtgtgctgcatttagaggtatgacagatttgttttatctgtgatttgctaactttcgattattagcctttcataatataaagaccaagtttgctaactgtgcaggtttcatggtcatatacatatgcagataataaaatttggacataggaagagaaatacgtaaggaaatattagcaagctataatttcttaattcattgcagatgtatgtattttaaggatatcatgaaattatgtgttaacggaagtttgatcaacattaacttgagaacaattagaccaacgacatacaagacaaattcaatcaaaacttgattagtttcaagacctttcaaaccattccttctgttagctagctcccagatcatgaagatcgatatctccttaacttcaggtcaaaatgagtaacaacacaataacctataagtagggctaggcaaaaaaaagaaccccgaattgatgataaactgaaccgaattgaactagtaaaaaataaacttttcttgataaaaccgaccaaaattcagttttggcggcaattggatttaggcaagcgcttccaaggtcggtaaagcatttaccacggtaaaggcctaatctattgacggtaaaaccaaatatcaacgtataaattttatattatctattactgggtgagaatatcaagcaaaacatgttgcccttctcattcaatttttttttattacatatccaaatttattttttcacgctgaattcatataaggaaaataaaattaaaattgatggcatcaacaagcacgtacaaaaattatcatagaatacttatacatagtttctatattggttcctttgaggagcacaacccaacaagtccacgttattacatgattccatttattcagaaaacaaattccaccaagaaaacaaaatcaactaggactgtttcccagacaattaaactgattaaggtactaaactacatggtgtatttcatatcaggatatagagttgaagcttccactccaaatgaagactcaatttcaaagttagtatgatcccgcctttaattaatttatgttggtgtaaataaaacatgaatttttttttttttcaacagaaaaagtgttttagtagtaacatgtatcatcttctaatatttttagtggatctatataagcaaaccccattaactttaaactaatttaagttaaaaataaaaggacctattttaagggttaaaaataccatatgtaaaaatttaatttgataaaattaattgttaacaagtaataaattgtatatctttaagatcgtattaatattagtcatttttacagcacttaccttgatttccaaccaggccaagtctctctcctacgggctcatgttgctgcgcacctagaatgcccctccccttgtttgacaactggaatgctttatgacatataggcatacttattttcactaatatttttttttactgcaattcagcaaaaaaattaggtagaagattataaaaaaaagaaaaaatataaatataaatttatttgacaatttcgcatcaaaatatatatatactgcggatgatttggtaatattccagtttttccgctttgattttttaaattagtatatttgtttagttgtaaaatttgttaggtttgtgtatactcatatataggtacagagagagtagagaaatgaaactctaatatgcaacgtagatacataagaatggcaaatgaggaaaagaattcgggaggagctgtaaagaaagaaggtgattcggttgatatatttttgaggaagggtatccgtgccttgcttacacaggaacaacaaaagaatcctcacttattttcattcctccaggatgacgacactgagattttgaatagcatcctcagaagacaagaccaaagaaagagagaagaagaaagaaagagagaagaagaaggcacgtccacgaaaggtgcttgcaatagcagtgctaataataatgttggagattccaagaattacaaggccatgtgaagaaattaaagattcaagaaatgaagggatgtgaggtgaagtttgttggaactagctctccctagatctctgaatatctacaagcacttcagtttatctttgatccaaaaaataaactctatgcatttgtctttaagttcaaacaataactctgttgcataacaatgttatatatatcctttagttgtttatgtaacaaattaaactgactcgtacttcacttatacatcaataaattcagatctttcttttgttctatatggtatcacaacctaattgcctgtgtatagggtaccactgtctgccctcctaaatccatcaccatcaatggctccgtaactgagaatccaaattattttttaatgttctattcaagtaaattaaattttttttatctgaatatgttattaatttcataaaatatatcttataaacaaacaacaccgtcaccaggccactgcgttcgccacaatgcccctccccttgttcagcaattggaatgctttgtggatgctattgccgaagacaattaccctgtgccctgtggtgcatgccagattagtgaaggcatcaaaggtccttgcatacgtttatcaatccatcacgatgataatgaatcatatttatctcaaatacttgttagatttcgttgctatcaactaatcatgatgataattaattataagttttattaatgattaataataaaggttttaaattgcaattgcaatcaattcattagattagaaactaatctcactcatggtgcgtgatggttactaattcaattttgttttgcatcgaatacaatttttccactaaatacatcattttttcatatataaacgcatcacgagtgagattagtttctaacctaatgaattgattgcaattgcaatttaaaaccgttattattaatcattaataaaacttataattaattatcatcatgattaattgcaatagtggaaaatttttaaattctttgtataattcaatatgatgaaagttgctttgtcatttgtgactatggtaggtaattgggcatgttttccagccgatggtgacaccagatgatttggagcaacaacctcaaccagtgacaacgttgtttgagatatatatgcatgctgaataaaatattcaattttttttttgcatcgaatataattttttcactaaatacatcatttttccatatatgaacgcaatgaagcattacatctctatatcaaccttatggattaaaacaaaatctttcttttacatcatgcaagtacatataattcgtagggaaagtaggaaaaaaaagaaaataaaatgtttttcttgtgtaatagagacatcaaacttggaactcaaactttcacaaacacaattttttagaccaagtaggaattaaacatgagctaggaagatctaatgttgaaggagagacgaatctgtgagaaaggaggacttgtaaacaaagcaagagcgaattgagaagaataggtagtggtggggtatatatagtagcggggtgtgcaaaacagaataagcaatttatagcagtgaaattttttaggacaaattatttacagcatgcaattaaacatttgatagtataaagtaattttataaatgtacgtatatatatatatatattatatattgatataattttacagatgttaaatattgatttacatgttaatataacatctgaaaattggaaaataaatataagtaaattaaatttcataaaaatattagtatagtatttattgttgttaaagtaattttatataattatttagataaatagacttttcttttatagcgtgaagaatttttgttaattacttaaaaaatttaaaacattaatttagaaaatatatttaaacgttttaattaattactttgatgtcacagccattttcaaaacctcaattgctttaggagtcttttttttctttctgtgtttgttggaaaacatagaataatgctgaaagagttcagtgattcgtacgtagtacttattattgaataatatcgttgtttatttgttgctattttataccttaaacacaatcgcaatgttaagcataagcattcaagaacatgtcttctttacccaaaaataacaagtattcatgtgtgtaactctttaaataatcaaaatactaatataaaatgctcatagatttcaattttgaaatatttattcaaaatgctcacatatgctctagctttgccaagatatttaaatactaaatttgtaaaacataaatataaattaaattatataactaaataaaatagacttactcaatgatttcttttgatttagagaaactattcataaacttcaattgattttttttagaaattattcaaattcttttaaaatggagaaaaatataacatcttgaattagttaaaaagtttgaaaaaataaaatacgaagcgtgacttttatgttttaataatcataaaaaattatttacccaaacacccatcccaaaatatgtaccaaaatactctttcttattattattcagagtagctaggtaattggctattttttccgttcccaaattgacttttgattcaccgaaatctcaacattctaaattgggttaaataagattttgtcattatagaatttcaaatttcgagttttaattcctataatttttccttatttttagttatggagttaaatttttgccgttttgatgtctatttttagttcctctgagcaactaattattgtatttttagaagcacttagcaactaattatgatgaattattttcaaattatttatgcatttaatatgtccttatgttttaattttttctataaaacatattttagtgtaccaacattaaaattcatattaacataatcataaagttatttcaaattttacttgttaacaattaattttatcaaattaatttttacatactgtattttttatgtatataatatattaagttgaagtttatttattacaaatacttaaattaacaattaatagcaaagatattataaattttatataattgtttatatgctacactatatgaaataacaaagagatatatttggataaaaaaattaattcacttgaatggaaaattaaaaaatataataagtacaaaataaaaatataatgttattcaaaaattatttttccattcgagatgaaaataaaataaaataataaagtaattatttgacacgaatttgttatttggtgtatattttacaaaaacattagaagtatttgattacttagcttctatatatgtgttatatattacttgtttcctttaattttcatgtgatatagactaagtgtcttgattcatggtcctttctcttttgttaaaaactttccttttgcattgcaatattgaaaaagtagccgttaataactctactactatacaaatactcttggcaactaaaacatcaaatcttatgtaagatatccaccctctcacacgagcaaaatatagaagagaagaaatctttcttggatgccaaatattttcctttgatttcctttctttttgtttatatatttgatatcacgatgtctggtaggtgtgcagcttgcaagaatcaaagaagaaaatgcccttcagattgcattttctttccatattttcctgccaatgatcctgaaagatttgcttgtgttcacagaatctatggtggcagcaatgttggaaaaatgcttcaggtgttttaaatatagataataatatttgatatcaatgtgtttatgttagtctataatatggaaaaaattatcaatatatcaaagttagaatatgtcatccaaagtcaataagattatgttactaaataacctttgtatattttgatgttgcagcatattccatcatacttacgtgaacaagctgcaaattctttgtattttgaagcacaatgtaggactcaagaccctgtttatggatgtgctgggattatctctaaattatataaacaaatcaacagtacagaaattgcacttgcccatgtccaaactcaaattacttgtcaaaagcttcaagtcccacaggcaaaagctgaatcaaacttcaatgtcttgtcaacaattgaagctgaaccaaactttgatgtcttgccagcacaaagcagcagcacagcagaatttcaatgggaaagtcaagttccttggtttagttaaaactaccatttccaattgatacaaagcatttgatttatattcattatgatgtcacaaccattttcaaaacctcaattgctttaggagtctttttttctctctgtttttgttggaaaacatagaataatgctgaaagagttcagtgattcgtagtacttattattgaatgatatcgttgtttatttgttgctattttatacctatacacaatggcaatgttaagcataagcattcaagaacatgtcttctttacccaaaaataacaagtattcatgtgtgtaactctaaataatcaaaatactaatataaaatgctcatagatttaaattttgaaatatttattcaaaatgctcacatatgctctagctttgccaagatatatttaaatactaaatttgtaaaacataaatataaattaaattatataactaaataaaatagacttacccaatgatttcttttgatttagaggaactattcataaacttcaattgaaaatatttttagaaattattcaaattctttaaaatggagaaaagatataacatcttgaattagttaaaaaaaattaaaaaaatacgaagcgtgacttttatgttttaataatcataaaaaattatttacccaaacacccatcccaaaatatgtaccaaaatactttttttttattaatattcagagtaggtaattggcaattttttggtacccaaattgacttttgattcaccgaaatctcaacattctaaatcgggttaaataagattttggtgttatagtatttcaaatttcgagttttaattcatataattttttcttatttttagttatttgtttatcatgattagtctttatggagttaattttttgtcattttgatgtctatttttagttcctctgagcaacaaattattgtatttttagaatcacttagcaactaattattgtatttttagatcacttagcaacttatttaattcttcttaattttatatgctttatcaatagagttcggcttttcaaatgaacatgcttttattttatttcattttaaacattaatttaatttagttgtattaaaataatttgtttaaataattaaatatattataattaatttttttatttcaattattttaggggtttaaaatgtgttagaattaagatttaagattttgtattaaaagcatgcattttaattataaaaaatgatcaaattgtatttcagaaagccttaaaaactaatatcttgattaaaattatatatttataaataatataaaaattaatattgattggtcccacaacagaattaaaaataaatactatatcaaaatcaatatcctaaatggtgacaggcctcacattgtggaggaagcttgttatatacgagttgaggatgttgtctacattgccattgttgttcttgatcattgatggctgcctcatcttgttgcaccatatatggtgttgaagaagtagtactagtagtagtaacagagttgggaaatattgaaattttaaatgagtacattttttccaaaaatgcggaaatatccaaaagatgtggactccgttgaaatgaaaagtcatattaagaaaaaaatgtccttatcatattgacaactatataatattttacctatgactttaaaaaaatattgtacactaaaaaaatacaatttgatcttttattttatactaataataatgcatcattttaaactaaattcacaattctaacacattttaaaacataaactaatcaattgtttaaaaaaattaattataatacatttagttattaaaataaacctaattaaattaggtatttattttttaaagaaaaaaatacacgttggaaattcggcatttgaaaagccaaactccatttgtactccacatacattaagactaatttgcttatacattatttttcttttaattttttttgaacaatctgttttttttttttttaaaaccggcaacctgatccaagctgatttggttcgagttataataaaaattaagcaaaactaaatgaaaacaaaatcgactggtttagatgaaaaaatcatctaaaaccacactgtggctacccctgggcctaatagtgagatattagaataaatgtagaaagatctactgcatgcatgtttggttgggtgttaacaccagtaaacatgcgtaaccttatactaaaaatactagattctccaacaatttaaagattttgacgtggatttgtaggaaaatgtggattttaagagcagatccaaacacactattggattttttttttctgtcgctattgcacacacacaaaattcataaaaagttcattagatccttgcttggccagaaaactaaataacacattggttttttttttttttttttttttttttatcagtagaataacacataggttacccgcacaatgaacgtgctgaataataatctcccaatcccttttaactagtgcctgaatgttattgattctacccaacatgaaattttaatagaatttttcatttgaattaagttccaacctaatctagacctaacaatatatagaataagattgaaattgtctgatttgttaacatgacaatgacatcaatttttatattatatataattaaatcacaaacttgataaaaaatatataattacaattaaaatatatttataatatattttaaaaataaataagtaaaaaaatataatttaggtaaaacattgtgtattaaattatgtcagaaagttcaatcattaataactacgggtaaagttagtgagacagataagtcatgaacattactaattatagttggcttatttttaatttggtgtactatttggttatttgatgtcacataaaatattttaaaatgtaatatcaaacattgcattttgatacttaaaaaaaaaaaatcatcttaaattttgtgtgtatatttgtcataatcacatcacatatcacaaagagttaaattgataaaatttaccactcgctttaaagttatgtacttatgtgggtgcgttgatcctccaaaataaatatcctaatagtaaactatgaaactttaggtacttttaaattgaaaaacttgcaagttttgaattcataacttgatctctcggagggttatgcacctgtagctggcttctttccatcaatgaacaagcccatggttttgaaccaccgcatcagatttcgatgttccttcacatatagccacgcttgaagaaatttaaagaggctctcgttcactcctcgctcctcaatgtaactgtgaaacgcatctctcatcttttcatctagttctctgtcatttacagaaaagtcagtcagcaaaaaacataagaatttccaagcgaagtttaacaggtatatgataaaacacaaaacgggcattctaggacaacacgcgtattcgtatcttccaaaagtaagaaattttttcttctcccaaaatgcaaaacacaattccgcagtttcttctctaagtccagcctatcttttctcagggaaagagcatcaaaatgaatcaatcacatcacattgacattgactttaattaaacactcacaattgagttccaaaatgaaatgaagtaactcgcacggtagagatattttcaataatagttattactataataaataaaaagagccaatacaccactactccttacagcaattgaagagttctgagtggagggcattctacttcatctccattcttttaatcctaaattcctaatatctacaaaaaaattaaatgcttcttcccaaaatctgcattttatacctaaatatagaactcggttttctaagaatttgggttttgaacttaattcaatctcaaaatctaacttagagagaagtgattccccacctatatatatactattttggtcatatatcactagttaacgtgaaatctccaagagacatgcttaccccggaaattacacacaacttatagcttgcaagattgaatatttgtaggtgatccaataacaacacctgataacgagtagtctaataaatccaacaacaaccactaggattccaatgccatcttagaacttcaaaagctaactcatgcggtaagtgttgttccccacttaaatcatatcaccagtaaacgtggaatctccgtccatgtttgatatatctttttccaccttatactttcatatactctagagattgcaatgacattaatttaagaatttaacagtgatgcacggacagtatatagttttgtaaaaatcaacaaacctactatccgtgatgtgtgattggatgattttacactatgagtgcatactttttttcttcttcttaatttaattaccaatctccagacctacactacacaagcataaaccctaaacaaagaaaaattgagagcaaagagcacagaactgacgcgaaaacagggccggtgtattgggaggggatgaggaggtagccggagtcctggaccttgggcctcatggaaacagagtgaatccccagagcatcctcgtacaaaccgcagaggaaaatcaaggattcgttctgctgaggtttggagacgtcgacgtggatgaagagctggtcgatggcggaatcctcgtcttcgggggtcaacaaccgcatgacatagatgctgacctcttcgtcgccgtagctgcgcttcagaaccggaccgtgcgagtccagagctcccttcacgatcgtgaacggcgacggaggactcactttctgctaggcacgtgccactctcacgtgagttagtcaatgtctaaacctaaagtaaaaccctagcacataacagagtgagagagagcttacagggggcatgttcattttggcgacttcttgatagtgatcctttagagagcggaggagcattgagttcacggcggaggagatgccgccacctcccgacgaatatggccgccggagagcacccacggcaccgaccaaggttctcttccacatttctctatcttttccttctattcctgcgctgtatgagattgtgttgtggcagcagctcaacccaactcagactactccactcaaacatttcaacaaaattatattgagtttaatttattaattaatcacaaataattttaattacaatttttagcatttattataaaagataattatcttgctatgtatatataatttattttcaaagaacaaaaacctttttttagatgttttttcaacaaattgttatgattgtgaaaatataaaattgacaattttattataaattaaagtttaatactactagtagtatttactattagaagttattaaattttagtttttcatttttttctatatatagttaattttctaatacaaattatttaatataaataatttatatttttaaggcataaacatttttttagtccttcaatttttgtttgttttcattagtccctcaaattttcaaaaaattaagtttagtccctccttgtttatcatttcatgggtttcatttgttacaatttttaatcatcaaaatttatttttttaattttataaaaagtaatttatgacaattttaaatgccaaaatatttgactagtaatatgatttgctgacattttttacatattttgatgattttaaagaagaaaaaaaaatatgaatgtgaaattgtgacaatttttaaaatatcttaactatttaaaatatcacaaatcttttttaaagaaattaaattaaaaaattgatgataaaaaatcgttacataataccattaatgcaaagaataaaaaaggactcaaaacagcttttcaaacaaattgacatgttcttttgcattacaaaagtgtccaaacacaagctaaaatcaattataagaaatcaaaaagtttattgaaaatgaatttaagaagctccaactcacacagataaaaacaaaataaatgcaaaaacaaggatcctgatgcgttggcaaaatgacttttgcctcaaacatgcacaataattgtagcttaaagcctgtttgcatctgactcaaatcaaaattttagttgcagctaaaatttttgctttagaaaatttgtgtcttctccgtttgagatatttcaaaacagggtataaattgccagacactgtcctttttctcatcaaccattctcataacagtcgattataagcagttttgacatgcatcacaccattccacaaaacaaggcccctctcagcagaagcaccgttaggtagcagtaccacatcaataacttccggccaaatatcatgcagaaggaatcctttatccttttgaatcaagagcttcttccaaagcaatgatgttggaaaattaattttacatttccacaataaatggaacaaagcaacaggcaatcatatttcttccataacatgggcaactgaacaatttttcatttcgtgagaaacctcaaacaaggcacaaattgaaagccctgatctttctgacttgtcaaaggagatatctaaagattcaaaatctgtatgaccaacaacttcttactaaatacagaagaagttaatactactagtacattttggagcaactgaaaaatgcatgtcatgtgagaattctatgagcttcggccatgaagggacttgcttgcttgtgaggctaagaccattgccttggctcttgtgctcatcagcatcaattccctcactgcacgacgctgatgttgccgggcatttttagctcgcttcggagctaatcggttgtccctttccacaaatgcaagtctgaatttttcagctactgataattcagtggaacttgaagatggagagatgggcttcaatgcaaacccatgcattgtccatgttctgggatcaatgtccttgacaacttcatcatccaatatgatattttgtaatgcttcccgaggaacctcagttcccttaaacccaaagggtgatgacttaggatttactacaacacgtgggcactcagtggaaaagtcctctaaagaatttttatcaatgtttggctgcaaataaaataaaataatcacttcttgaagaaatgtcggccatgaaaaaatattaaactactagcaacttctattttctatatgcaatgagaatcaaagaaaaatcgttatccatcatgcctattttttcctaattctcactccatcccccattggctggacgaagtgcagcctatgtgtctctacaccaaccaatgctatcataaaaacaaagacatcaaactaagaaggaaatacatgaatttttgcatttcagtaaggacaaaaattgcattcaattacaaattagacagaagttttcaagttcatacccacacaagccacctgagtgattgtgccccactagcaatttcttttgtatcaagctcctcccaagaatcctcctccacataatcatcaaaccttggtttaaatatacccaagcatcttcgtgcagtgttgtcactccttggacatcctctgcaatattaattatggttcattgcctgttatgagttttgtaatgatgtaatcctagtcaaaacacagtcttgtatccaatgtgatttattagacaaaaatcattgtgtaataaagtaggaaattactaccatgaaaacaaaaaaaaaaaaaaaaagcaccctaaacaattttaaaattacataattttctacctttttgatttaatttgatttttaaaacaaaagagagaataaatatagaataaatttcccaatacctacaacttcccaagtttcggataacatttccttcgtgagaatatacatcaattttttatatcaaagccagtttttggcattataaataaatgagtaagtaaatatgttttgatcatctttacaagagaactcaatttacagatcctaacgacaaaagtatgacagatacaatagtaacaagaacatggtacctaaagggcccattgaagcaaaattacaagttttcagattatgtcttaaatgatagacaaaatacagtctaaaacaacacaatgaacaaattgcattaacaaagaaataaaacttaaagtggatagcacaggatatgtacccgcatctcaatgtctccaataagtggcagtgcttcacaagctcggatataccattagcagtaattttggtgcaccggctgcaaatagtctcaatatatcaagtgattctgaaagagagagaagtataatataaaaacacacactacaaaactaaaaaaatgattgttagcatcacatcaatcctacaatatgctaacctcaaggcaagttgttgacggaccaaaaactaggtgaagaaaattaataataaccacatccagtagaagtaaaaccatgaaatacaattaaaattacaatggaagaggatgatctaagcataaaactcaatctgcattcatcactcacttctaataaactcatgatatagttcaaacagcaaaatattttctcaaaatgtgcctaccagctggtccattgaatgggacatatgacatgctcttgtagcatcaagtaagctacagagttaagactacaagctagagcatattgcatgaaatgtcttctgaaatttgaatatacatgaaaagactaaatattatgataattcttgttttttcagcttatttattcccatttctcagacatcaaagatcaattgcattacaattaaagcatagtaattgtttcatttttttaataaaaaaagttatagttctataccttatatctagagctttaatgaatctacatacttcagctgcttttatcaagccaaaatcagagacatctgagccagagacatcaaggatttcccaggaagtatcagctaatgcgatcaggatatcatcattcagcaattttcttcttctagcaatagctgccactgctatctgtcattaagcataactaacttttttatttgtattgtatgtatgtataaaatacatgctgcaggatgaaggattctttttgttcttttttgggggaagatacattataatcaaagatttttaacaagggataaacaaagaagtgtttagaacagtgagcggaacacaagtttcaaccacttaagaatattaaccgggtgcctcaacaaaggatatttctttagcaaagaaagcgggaaatcctggagaaatctttttttcccacacatttacattgagaacactataaatttagaatttcacttgttgacaaatatgagcattaggataaatgacttattaaaggatttgaagaatcagaatcattctctagcaacctacctttatatcagctggcaagttgatagcaatttcactcaaatctgcaacaatatcctccaaatgtcttccaagaactccaacgcaaagactgactaaactcggaggcttcgccttcttaggcagtaatcctgcacaaaaatttctcaaataatttgttaatgcctatcatgtggcacatgcttatgaaaaaataattggtgcatcgtgccaccaaggtttaaaccctaagatctcatttaaactaccaaaacctctcacaactaacacccacctagtgtctccttcaaagaaaacaaattttagtcattctattcaggggcaaaactcaaactgagcttcaattgtcagcataatctagtcatacaaacacagagtctaagggcaaaaccaaattaaacaatgagcacttgccacaaaaccaggcaatatgatcaaaactgaaaccaattgcagtaaaaggcccaaatgagggttgaagtgttttttgtttgtttttgaagttttctacctaaaattatcacagaaacaaagaaccactgcatttcagagttagtattgttttgtcaacggtctttcaatttcaattgatccccaaaacagagcaagtgcaattgatcatgggtcaatgaaaggtgaaagctttaccaaaaaccaaacataaacataacaccccatctctaaaatacaaaagcagattgaaagagagaaaaaggggtttaaaaaataccgggaaattgagggtgggtgagtgaaatggaagacttggatttgacgttggatggaggattcaaatcgaggttttgcaaagaggtcgctaatgccttggcacctttacctttatccatccaaaatcaaaatgaaaaacgatgtaacagaacgtgcccttacacaatacctcaattctgaggaaccaaatttgacggtgtaccaacttattctaatctctctctctttcttgtcttctgaaataaacgaagccgactttacttgcgaccaaaaaaaaaattaggaggctctcgcacatggaagggggaggaaaattgtaagtcactttatccattcatatacaaacaactattttcagatttaaatttatgatgaataagtcatcaagatataattttactgactttacttgttacctcctttggaaaaatttattattttctgtattaattttaatttattattttgttaaaaaaataagtagtatggttactatggtatacagtacatttttatttttatataataaaaaattataacaaactaatacttttcaatatataaatatattatattaaaatttataatttttaaatatatataatttatgtttaaatttataataaaaaattaaattataatataaagttatttttttaactattgttatgtttttttagaaaaaaactgttaaaatataatttaaaaataaggattacaaaaatggtatattgaaatagactagcagttaaaatgattaagtatatatataattatataaagatttttaaaagggtgatttgaaattattaaaatataaatattttgattcattgcaaaaatattatgtaaatgtattagtattttttatatataaattataggtatttgtcaactcatcattggagacaacttatttaaacagagtatttggaataatatgaaatagggtgttcatgacctaactcatcttactaacttaatctgttcttaaaggatttttttaacgagttcaagttaaagaaattagataaatttgctttaaggatggatttagacttatattttaggtcatttcaacctactacaatgtcattttttaaagtataatatttaaaaaataattatatattgataatacaactccttgacaaataaataatattttgtttgatataatattatatttataatatttattttaaaaataatattataaatatattttaattataattatatacttctttaattctacaaaataattatatgtaacgttaataatattaatatatcatgtaaacaaattaagtttatccaagtctattccatatatatttgtctagttttaattgaattgggttagaaacttagaattcacaaaaattgtttgtgttaaaaaatttgatcaaggtgagatgaggattatagtctgtttagatataaagttagaaatattttttaaagtttttttattagaaaaaattctatattttgaataattttctttaaaaaaatatttataatttgtatctaaacagatcttatttctaatttgttatcttctaatatgtattaataagttcaattgattgtgtctcttaaaagaaattctcattgtttgttatgaacaaaattatacagtagtattagtgatgatatataatacagattaaactcataaagtattaaatatttcaaaagtaagtttggtttgttacaatcggcaaaaccaaacatagaattgtcgtaactcgtaattaaattagttaggcttttgtcaactgggcatttgcaactgtccagtgtccagtctacttaggtgtaataaagcgtcattttatagagtttaatttttatgtaatgttagtataaaatatttctattattaattaataccctaattagtattctttttctattatacataaatataaatattttttggatatttttaaaaatatacattactgattctttgtgtattttgatgtttctaatcattttttcattttttattaatcctttatttatgttaatatatgtatgctaattcatataaatgatattaaaaattcaaaaagggtacaaaattatggttgatatgtttttaattttttttacaacgatatgttttctaaaagttaataagattatcatataataatacatataatcgacattgtaaataaatgataatataaattttttagatcatccgtgaagagattagttacttttttatgtaacacttaaaatattctcattttaagtaaaaagattatgcttttcatatgaattcccattccagttagtaaaaatgaaactctccgttttaaaaagaatcaggttcattctgattcgaacgtaatataaacatatttatgtatttttgtttaacaatataaaactttgaaataattcctttattttcttataaaagattgcagtgaagacgacattacttcaattcacagtaaacaaaaaattctaggcccaaggagcattcatagaaaaaattacatttactttactttaagataacaagtgagagtttgaatttatgactcgaaagataaactcagtttcatttcactggacttgctttagttttgttttttcttccaataattcatgacacagtataaaaacttttatgattaagtaatttaaagtttattttctgttgccatgattttatccttttacgaaaagttaaattttaatgtaagaaaaataaatttatagattacacttcaaactcgcgaaacacgttgaaaataaaataattatttgtgtctaatacttaaacggaactttttagtctttaggtaacactttaacggagacatcgaccgtccggacaaaaaaaaatattatttatctaaatgtcacacgatcagaaagttttatcaactgtcacgtggtataattcacttgtcagtctagtgaaatacgtgatgaacactagcagtcagggagtaattcgagcccagcgaattaggtagacacgtggcagacaggaagtaattcattggggagcccagcgaattacctggcaatggaaaaatctcaaaaacttcgaacggtcataacttttgatagaaatttccgatggaggcgtatgatatgtcaaaagctcaaaatttagaggcgaagggaaggggattttggtccactatttttttcaaaaaatgcgtctaagtgcaatatgtccttcaaatgatttaacttttgatagaaatattcgatggaggtatacaatacgtcaaaatgctcgcctctgaatttcgagcattttgacatattatacgcctccatcgaatatttctatcaaaatttatgaccgttcgaaatttttgagatttttttctattactacgtaattcgttgatctccccagcgaattactctctgtttgccaagtgtccacctaattcgctgggctccccaatgaattactctctgactgtcacgtgtctatcacgtatttcgttggactgacaagcgaattatatcgcatggtaaaactttttggtcgcatgccatttaggtaaataatttttttttttttgtggcaggtctatgtctccactttaacgtttgataattggtaagcattgactagggacaaaactcacataactactccattttatataggtgtggtgtgctatactttaagtaacgtagtgagccaatcccacttgcgtgggtgagttaaataaaaatgcgggtaaaatctatttttcgttcttgtatttttatttaaaattagttttaggttctgtattaattttcaaattgattattttgatcttcaacatttaaaaaatatgtaaatttagctccttaacagcattaacattgttaaaggaaaaggactaattctgcatatttttcaaattttgaaaacaaaaaatggttgatttgaagttacaaagattaaatcctattttgatccgtttaaaataaaaatattaaataaaagaaattttgaaaaaatattttaaaaaaatataaatgttacaaattatttattcattttaattttaaaataaatagcctatgtactaatagtataaaaagatattaattaattttacaataatttttttaatattcatacgtagtatagtttcttaatgattaatagtataattttttttacaagtaataaatttatagtttcaaattcttaattttaattgtttaatagaataagaattattgtatatctggaaatttttttacttaatttctacttatatatatggtaaactatatacatttttaattcaaaagtgagtaagagtaaattaatataattatttataattatccatgtgataatgttaaccacttttaagactcaattaacattagataatattaatatctaagaatatctttaatattggatcttgaggataaatcttaagatcttggggatagatcttaaggatgtggaacaagtatttggtgtcctctaatctcaattcgtgattatatgtggttcatcgcatgcctggaacatggatataatgaaaaatataattttggcatgcattatattacataacatgattgtcgatgacgaacgagatacatttagtgataatattgatgttgattattatcacatagacaatgacattttaaattttaaaacatctcgtggtactctcctgattttactacatacttgcaaacaagacacgttatgtgtataaaaataattgatcaacaacttcaaacatacttgatagagcatatttaagaatgttacaatcataacaataataattttttttttggcattaatgtgttatattttttattatcaaatttatgtattattttttttaacatttagtcataaataaaaaataaatttatgcttatttttctatttcttaatatttataaaaaattcttacatattttattaattaaatttaattacttaattaattatattcaatttaataaatatttatataaaatatttaaaaatgagatataggacagattaaaagttatctaagatgagatctatcactaatagaaaaatgaaaaaaatcttaaagttttttaattttatgtgacacattaaaatccatcaaaaaattatataagattcaatttgattttataagaaattatatctaactttttcttcctttataaaaaaaaatataactttttctagttttttctcaactaaactaattgatgaacttaaacctgctttaaccaacataaagttagcagctagctcaatttcacaaaaaaaataataaaaatagcagcctagttttccctatctatttaagcctagttcttgtgcccattaatgcagtcaggtccacctctcacatctacatatcaagcaactaggcttctcaaattgcattcctagtacataacataacaccctccatccttggacttcattcacactcccaacgcttcctctttctcccataaataccttcattcatttcaacaccacttcctcacttttgttactttcctagtttctctctcaatatggttggagcccttctcctcaacgccaacttcaagattcatttctcacgcatatcaagccaagcccgtgtccccttacccgtcaagcccgcaccgctcagaatgcccacttcccaatacccccactgggcctccttgcaggccgacattgaagcccacctcaaacaaaccattcccgccaaagaacccctcgaggtcttcgagcccatgttccacctcgccttcgccgccccccggaccaccgtcccggccctatgcctcgccacctgcgagcttgtcggcggtcaccgccaacaagccatggccgcggcatcggccttgttactcaacctcgccaatgcacacgcccatgaacaccttcctctaaccgacgggcctgggtccaggcccatgtacggccccaacatagaactcctcaccggggacgggatggttccgttcgggtttgagttgctggcgaggcccgacgggccagcacgtgcgagcccggagcgagtcctgcgtgtgataattgagatatcacgtgcggtggggtcggtggggttgcaagacgcgcagtacgtgaaaaaaacgttgtgggagggtgaatcggacggtggtgaggaggtgcaacacgtggaaagcatgcaacgcgttgtattggagaaaagggacggtgggttgcatgcatgtggggctgcgtgtggtgccatgttgggaggtgggagtgaggaccaaattgaaaggttgagaaaatttggatttcatgtggggatgatgaggggaatgctagaaatggggttcaaggaaaaacatgtggaagaggagagagagcttgcactcaaggaattgcaatttttcatggacacagatgttcatgttcttcatattatttctagttttctttattaatttctacccaccagttttaaggaatctatctggaatctcaagtgggttattatccatttacatatgtacggaacatgatcaactgtgcagttcataaagaataattgcacgatcatgcgtttcaaatctgatggtaaaattatattttaatgtgtaaaatttattttcaaggataatactttttagtacgaaaaataatataccaaatattcaccgtgtttttacatcaaccacatgcactaatttattttttccattcataacttccaattaaccaatagaaaataatcaaaatatgcacgagtattcgtgcgttttttttttgcactaaatagcaggactctatttttattaatgctatttgagattcatgcttatgcagttgaaaattcaaactgatccatatatatatatatatatatatatatgtgtgtgtgtgtgtgtgtaataatactatttttagtgaattaaatacaaacccattaactgcgtgttttaattatttctgttaagcgtgaagaaacacttagttacctaaactcaacttgaaccagacgacgtttttctttatcagtaaaagtattaatattaaggggtactaagagctaccccaacccttatacaaaaaaatgtattcatcatccatgtaagtataaagtcaaagttgatgtcgaaacccattctcttaacttcatccatgcaagtactaattcaaattaataagagtagtcagaataattaattttttttttaataagagtagaaattttgtagaatacatgcgcttttatttatggcaaccctacttagtcaaaggagaattttgtggaatagtactgggtctatctaatttgatgctgaaaatgctagcttggtcctatgtagggattttaatgccattctcttttaacatgagaaatagagaaagtggggaggagactccaatcttcatatagtatgatggaggtagatctaatgttcttttttgcttgtgtgaggagagaaacaaagtattgttaggttgtttggtttaaaaaatatatatgataaattgagtgaaaataaaatgttaagattacatattattttgttatttgtgataagatagtaattagtaatttagtcctcattacttattattaggggtggaagtgggccaggctgcctatcaggggtctttggcctggcctggcttgtttactataaagaccaagctaaggctttttgaaaagtctatttaaataaaaaggtcaggctcaagctttaaaaaaagcctattaggcctatcaggatggcttatttaatatatatatatatatatatatatacacatatacatatacacattaaaacttaaaataatatatttatttttctaaaaatattttttcttattatgaaggtggatgatcaaccacttcaaaaaagtaccttgaaaatttcataaaataattaagagaaacatatctataacttataagaatttgaaattttataatttatgagataaacatatctattatgttatttttatttttaattatttatttttatttaatcaggctttgtatacaggctttcaggccaggccaggcccttatgcaggccaggctcaggccttaataacttatgtttaacaggtaacaagccaggcttaggcttaatgattgtgatgcgggccaggctcaggcctatcaaagcctggcctggcctatttccacccctacttattattagattgattatatgtaatcaatattgattatatttgttcattataaataaatcgttagtgttgtcgtccttaacacataacattatagtaaaatactgttgtatggtataaaaatttagattattcttcacaaagaatagtgaaaatcgtgctccatcgatgacttactgtcaagtccccggtggatcttctgctcattgcccatcttccaatgaccatttctcctttcctaatgacttttctaagcggtcattcttgccattgtctcgaaccaaacaattttagttccattttgtttttttccctcttttctcaatcgcagcccctttgtcgcttgaataatatcatgactattgtgagcactattacattgccactatgttgcattttcgttggtgtacctagacgatcgaaagtgtctccctccaacgaacccaacatcgcaaatctcactgtcatatgtcgccaccctctgatgcgtgacactcacgcgcctgcaccgaatcaacatgtgatgttgttttttgaatgacccatcctccaatgacctccccatcatgcttcttcttttctagaaaaacctatttttacttcatttggctcgatttccatttgtttggttgctttggctattgtatctacacacctaactaatagttggccaaatagccatgtgacaccttttccagcgtggtgaccatgccatcattctcatcttcttccgacaaccctatttcgttgttgtttgactctgttttgtcgttgtttggttgacccacaatccagcgatcgcatcatcgcactttgtctctttctagcgacctagccaaagaccaccatgccatccatgtgcatagccaattcaaaacaccacaacatgccccccacatagggtcttggtgcatgatgatcacgcacacgacacgtaacacatctccaacaagcatcacagtggtcttcatcgtcattgcgagcctttgttgctgccatcgaatcatgtttatccgatacaatcacatacttgaatcgcctttagtttttatcaaattgaccacatttataacaagctcgagcttaagggagagttttaagattacatattgttctgttatttgtgatcagataataattagtgatttagtctttattagtcattattagatttatccaatataatcaatactgatcatatttatttgttataaataaaggtttaatgtaatcatccttaacacaacattacagtaatacttgtcatatgaaaaatattgatatatccttattaatatatgtttctttttttttttcaatcaaatgaatcaattttgttgataaaaaagacaaaaaaaaaaaaaaacacaaacataaatgtacacaccttatccttaccaaggacaaaaatttcaaaggaggaacgcaccttcacccaattaattaaattaaatcttgctcacaaatcaactccataaaaccacctaaaaaaactccatcgttgctcattgtccctatcttgtcgctgacaaacacaacttcaaaggatatggtttgattgtgtgggggagaggttactatataaggggaaaaaattaaaaaatagtgagtctcacatttattttttattttaattcaaatatttttttttccatttctctttcattcttttctcttctatacaaacaaacctatcccaagggatacaagtacacaaggcaaaataatcctagaaatattttctctacaaagaaaaagctagacaggtctctaactatagtgacaactacgttaggtgtgagttctgatcacttttccttagtcattgattttattccaaaaatgagaagtgataaaaaaaagtacaatttaaatatatagtctcagttaatataccaaaatttagatttagttattcaaaataacttttgttggatttgatttttatatattttttaaatggtcgctaacattatttagtgattgcaggacatgtatgaagacatgttacctcggtgactattttatgacatgttatgccaatgtcattaataaatgataatagagaccattttaaatttttaaaaatttatatgaattaaaaccaataaaaaattgaagtattaaaacaagaattcacagtatttatacataataacagtatatttttaccaaaacttaaatacgaggcattatgggaaaagtacaagcattgtggaaccttagtgaaaaaatggtagagacaagggaagggtaaggaagatgctggggaatagttaactgaaaaataaaaaaatctgcaaaaatacctactacagtggcacataaagacttcaattttttcaaatgcaaatctatagatttctagactctaacaaagactaacagttctttgaaatgacccccataataataaaacttgtgaggaaatggagagtaatcaaaggaggactatggaagtagaactactactgtgtgtaaagatttagattgaaatgactgaaatggggagataataacaagagtttctttcatgctactacaatccaaagatataggtatgcttacaccaattgaaaggtgacagtaaggcatggttggaaggttaatattacagacttatgaatgtaatcactttagacacattagtccccataattttaatgttcaaggtattgtaaagattattgtgttactgttaagtttagggttctataacataattgatttctccatatctgagtacctttgtaggagccagattaattcaagacaaaatagtcatagcacatgaggactttcatgctttgaagaggagcagcgaaggcacaaaaagaatagccctaaagcttgacgtgagtaaagcctatgagaaattagaatggactttcttggagaaggctctaatagcatatgggtctggggataaatgggctaagttagttatggccttattgtctagtataacatatacagtctaaatgtgttccaaagtcctacagaggcctcaagcccatttattattcttgcctcaaatactctctctcaaatattttagaaagaataaatcattaatttcgtttttaaagtattactgtctcccttaaataatccataaattaagaaaaacatttaaataatccttaaagtattgaataaccataacttttaatttaagttaatgtatttttaacaaagtttaagaactattttgaaggtattttttaatatttggagaactacttaacacaactttttatacttttgggatcacttgagtagtttttttttttttttttttataaaaaaaatagagtatttagaagagagtaatattttaaggatgaattgattattaagaaagctcttacatatggagatttattgtgaaccccttctagcccaactctttcctacgtaccttctatttgaagattatgctcttatctttgggattacttgtgctggagaagctgtccatatttttaacctgtcccgggtcaaaggattaacttagcaaagtctggattaatctttggcaaatatattctactgctactaaaagagatatatattattagtgtcttaggaaaagaagcttgggaaattgttggtaattttcttggtctcccaacagaatggggcagatctagaaataacactcttcagtggattagggagaagaggaaactctaatcaaggtcgtctttcaaagggattccctcttatgcaatacctgttatacactttccttagtctttttgtacctttctaatttcctcagtagctaggttctgatggaggaataagggtaggaagaggattgctctagaatagttggcaaatattgtcctttggtggtattactaatctagcaaagtagaattggccggcttatagagacccaaattcattatttttgtttcatgggtttgacatagtattcttcaaggcaaggagtttgttaagtagggtcattgaaccataataaacgagaataaggtaggtattaaatgatagtagatgaattagagccattcgaccccattctaagtttggattatttagttaagagaagctatcatgttgctaaacaaatatcatgtgaagtgagaagatcaatgagctcctcttcataattaaggcaccccatataaggttagacattttctagggaaggtcttccataatgcttttttggtcataacaaacattttcgctatgaagcatggctgtctatctactatgtatgttgtcccatctggtgcaagagacaaatcagcatactctattactctgtccctagacctaactagtttgatttaggacacaaatacgatgctatttttattttacgtgtcaaagattaatcaagtacattctatatcccttatgttgtggtactggtatatttggaaagcaagaaacaaattgatcaatcaaaacaatactcataatcctaccatttagtttacatttaatcattgcaatcattaaaacaatataatatatgaaaactttttttattattaaaaaccaatataatgtttataataaacaaaacagtttgaattatatgtcacggcaaggtttgaagtttttttccccttttagtttaaatacaaaaactcacatgaggttgcattgattcaaaagacacatgaatgttttgcaataataaagaatatatgttagttacatattttaattttttttatcattgaattaatttcatatattgggtcttactaaaataattgttcaaatttattcaaaaatatgttgaaaacatcctgttggtaatatttgactttttgttcctcctacagtggcatgtagtttatatttggagaactaaattaaacacggaatctgtcgtgaaagaagttgatacttgataggttgactgtactataatgctactagaattgtgcacaatagataactttattatttctttaagtatttctccttttttttatcagttatgtatttctgatttaaaattttaaaaaaagaggtcttaatcagtgtatttgcatttaataattttttggcatggatattcgaaacagacaataaaggtaaaaaattgattgggaaaaaaataaaactcgtttaaaattgaaatgagctacaaaaagcgtacactagacgtaggttgtattaaattaatcttatggagatcaaagctgaaaattgatagggactcctacatactgggtgtttctgtttccccttcccttctcgcattatcacacgtcattagatactatacattgagagtctataattattagatgacacgaagttggtgaatgtctatgtcaatttcccaccccacaacatgattgaataatttagacccttcttacagagttctgaagtctcgttattttaaagatttataaatgcttgtagttctaaattggaccaacaaacaattatttgaggctaatcgagtttataccacatttattagaaattctcaactcatatagctttacacaaacgagtaactcatttcaacttttaagtgaaatggcaaacccttggtttattggactcagaaaattgcaaacagtctatgtatattacaactttgtggaagttgtataactaatattattttccgactcgtgtaagggttattcaattttgtcatggactttgatttcacttaatactatactacatccgatcctttttactaaaaacaacaaaaaagtaatagtctaaaatatattatcacttgtttcttgtaaaaaatacggtaggtaatagcatccaaatggggaaaaaatagcattaaaaacatagaaaaaaaatgattcacgcatcaatgatgtagagagtaataatttttatatacttctgttttctaacaactccttctccaccttctttttctttgtataattgtatctgttgttttcgctcatcacatttcttattttctatcccatcacttcttatcactctttcctcatccaaaggtggatggatacacctcacagaatctttattcaatacagagtaataaaggaatagggaagtagaccaaggcttggacagttggacttgtgcacagggaaaacaaaggggaaaagaaaacaaaaaatcagtgtcaaagtaaaatagaaaaacacttgtatccttcaaaatgttttatggctctataattatgattcaccattaagtttgtatggatgctcaaaaccacacatctgatcccatgaatttgttataacagaaggagatgaaaccagttatgattgccacaaccaatttgattcattgttttcatggtaaatggctaaacaattcttttatataccccaagcatatgaacacaacatccattcctaaataacctctaactacaaaccccactatacatcccaaatgtaaaagagctactactatcatgtttggataacacataagaatcaattctaccccatataatcaggtgataccataaaaaaagtagaagaaactatttgttgtttttacctacaccatgaaaaattaattgattatgttttaccataaagctacatcactactcaagagacccctttatagtgattcaaggaaaccagtttttgagagtacagcattcctcactttgctaagatccctacctttgagggttctcccagcaccttctaaaacagaaaatgaggatatctgactccttgcaagccttctggcaataaactcatgtggaggaagcttatcactgtcatcattttcctctccatcctcatcactactcccaccatagttagcaacaccatcatcatcaccatcataatcaccatcaaaccttgaattagcactattcttggggggtttagtgctataaatctttgaccagtcaggaatgttgacaggtgctgattgctgaagaaccttatcttcattggaggaactagcactgctgctattgctagatcttgggatcattctggctgaactaggcctagcaggaacaggaacaggaacaggaacagaagaggattgatctttgtctttgaacttgcgaaccccagaagtaccataatcactacttctgttcttgaaaacatcccaaacttcttcttcatcaaaatctccatctctcaaggacttccatatcccactatgctgcctgcctagactatatttatcttccatcacaaatcaatcacttcctgcatagtcacataacacaaatgtgaagaaaattatctcaaattattgaactagaattttcactggtttaagcaaaagacaaaaaggagaatttggaaattgaggggagaaattaagaaccaaaactataaatcacagggggtgattatatttgatacaataagatatttggtattttattgaggaaaaataaaaggaaccacctttatgttgttgttgttgctgtcctggaatcagaagcttgaaataacccaactttatattgattctaaagtggtttcttgctggaatatgcaaagaaaaaatgagttgtgaaatgagagatgagtcagcttgaattaattctgataccataagaacttgaattgactgaatatatatgatggtgagtcaaaatccataatattatggcttacctgaacaagtttgcagagagattataggagaaacagcaaagcaaagagagagcaagttcgttctttctgaaggggaaagaatgagacactgaatgataggtgtccacgtatttaactctggtacctcacaggattaactttttagtttttacaacgtagtacatgtacatgcccactatcttttttattttcaacacctctgttctgagttctgaccgtctaaaccttaaataattcaattactaccttttatttttatttatatcgcatttattactaataactcatattatcaattagagttaatgttgatgcacgaataatttaattcattttatactatcatttaattataaattattatttaaattagtttaagataattattttaaaaattatcacatttatcataaaattattattagatgattatataattttttttctttccatgagtccaccaagattattgtttttattttttattttttcacctactcattcacaaccttttccatataagtgatgattaattgagtttagtatacagtccaaaaataaataaatttgagttgagtatatgttgtgaatctctaatgcatctatatttatacgaggaatagtcatttgatcctaaaattatagtgaattattacatgtccttgtcgtaaaaaaaatattagtccttgaaaataaaaataaaaactcaaataaatagcggaacttttttagaattttagttaacttgttaaaaattaatcattttgttgcttttaaataagaatcctaaatggtaataataacatatgtatagaaaataattttattattattactatattttttgttaccagagtaatgctgtgaaatattcatcaatttcaatgatcattaatctttattcattgatcatcatagtaaatatatgtttttcatcatatttttatttatttataagactctaacctcaaatcttccttgcttgaagtatagaataaattaacttataaacatttttatccataaaaatcaaacttaagtactaataaatttataataatttacttatgttgcttaagtaattgaattagattttttatatttataagcatattgtatcatgaaaattaaatacatacctatattaaatactaaaattattaaatgtaatacataattaacatacataataatattcatttttgcattaattaattataaatcatttttcaaattaattaattttcatattaataaatatattcaaacctttttatcataaaagtaattataaaaaatttatatctgaaaaaatatattaaatttttcttattgtaaaattaattatattaaaattaatatctaaaaaatatactaaatacattaattttttagaacaaaataaatttataaatatattatattaataaacttaactgatattaaaattagatgctatatttgttaaatacaagcataattagcttcagtaatacattgactataacatacacattcatctattataatatattatgttgattaataaattttcatattgataaatattttttataaaattattatcataattgaaaattaagaatttcatacctgaaaatatagtttcatcaagaaacttatcattttcattattatttggagcatattataatgtataaacttgttgaaataaaaggtaatcaaatgcttaatcttataatacaaaaaattcatgaatatataatatatatttttttgaagaaaattcataaattttgagaaattaactataaacataataaattaaaataaaatatttaaattcaataagatggaagtcaataaatacatattaaactaataatacgagaaaacatgaaaatattgtaatatgatattaatatattgttattattttctatttatatttaacactatcttatctctctctctctctctctctctctctctatatatatatatatatatatatacacacatataaataattaacagtacattaatattaaatactatgtttattaaataatgtaatatatattccatgaaaattaacaatgtaatatataattaatttaaattaaactattaaatgacatggtaattaattatgacatgtttctaagctatatactttttcatgttaataaataataaatatattaaaagaatattacataaaagatagttattacaaactttactcttaaaaataagatagttataataagataaatttataagcatattatataattaaaattaatttcacattaatattaaatgctttattaattaaatgtaatacataattaacttaaatacatattacatgcaataatttcaatatatttccccgatacatgaatttccatgttaatatttaaaaattattaaaatttcatacataaaaagtatactaaaaagtatttttttcattattatttataataaattaatgtttcatttgtaactactagtatattaccattaaataaagttgataatttcttttattgattttttattgaaaatttatattattatgcaaaacatgttatctacaataaaatttgttaataaattataaactaataaaaaattattttctcaacatcttttttttttatattttaaattgtatgttttttttctccatatttatacaaattgctcacgcacctcttgacataaagaacatttaccctttcaataagtgcccacaactcatgattaattttttccttcactatttctttcattaaataattttatactatcattcaatcataaattattatttttttataaaaaaaaatttagtatttaatattaataaacaggctgccataagatgtgtcaaccagaaaagttatacaagcacaatatagtaagtgtgatgctgcaatcatgatccaataagaaatcacataaatattgcagccatgtattcaccatagtagacccaatcccaaaacaataaaccaagtagacccgtgctcactcatgcatacaacggcactcaggggttctattttccaaacatacaaggagaaatcgaatccttttgctttacaccagttccacgccctatatccaaattcatcacaaatcaaggttgataatgatataacttaataaacgcgagtgacatttgattattggctattaatggagcattaattgaaaattaactctgattaaattgtggtcgtgtcatttaataattttctagatcctcttcgggttaaaatgttgtattgaagaacatgtgcttgaaaattctaaggaagactacaagaaacgatggtatatacagcccccttgaattggtggcgaacagataaagacaggctattctcgaggaaacagacaaaagagtcgaagtttcaacaacacacatgaatacaagtgttggaaattgtgtaaaaaaaaatacttatgatgcacatttgaccctaattacacgaccattttttgtcttgtcttcctctttttgttttttctttaacttattttcatcctagagcatacatttttattaccatatcatcaagagggaaggatatatatgatatactgatgtttgtgattagggtgataaggttacaaatatatttttttagtacatttttagtatattataggagtattttaaatttaaatgaaatttctaaattaaaaataatttcaatattattaatatatattttattttattttatgaaaataaataaaatatatagtagttttaaaatttagaagaaagatataaaaaaatatgttttttatatataactttaaatttaaaaaataaatttaaattacggttatagggactatgataattttaaaattccttttagtttaaaaaatatatatttaatttacaatgcattaaaacttaaaatttaaattaaattaaatttaagtaacagtatttgaaaatataaatataaagtcacgtaaattaatgaaaaaggaaaacatttcttaaaactgatctcattttaaaataaaaagactcaaatatgaaatatgtaatgtgaacaagatctcaaatagagtcttgcaagtggaaaaaattgttaaggagcttaaataaatccatccaattcaaattaattataatctaccaacattaacatattaattgtgatgaaacttgatattaatccttaagcaagggtcttacatttatgtcttatgaataataaaaaagtaattaaaaagagatatttgttaaaaataattagtcaggttctcaatgaaaaatatatagtaattaataagtaaaactaataaatattttacgtctattacatagttatatatatatatatatatatattccaatgtgacttttaaatacgttaatttaatataaaaaataaagttgaaaggaaggtaacgtaaaactattagtagataaaaaatgaaaaagttaaaattctataaggagaaagaaaattagtacacggaaatgatctctgttctggcacagcatttgctttgtcaaagtttttaattcttttttttctttaattttctgaaaaaagctgtgtaaattgaaaccaaagggaaatggttcgtgaaagtttctgatgttgaagaagatcaacgtggcccacatgcaccaattgccaatccaccattcaacatatatggatatgaaattttgtcagggagaataactactcccaggatttagtgggaatcttatgtaaagaattaatctgctatataagattttccaccgttggagcagaatcttcttgctaaaagctaagccatgcacagcattgaggtggcggctgtaaagtgacagcactggtgttgagtacgataatcaacacttagcacagttatctgattttagtcataattaaaaatttatatattagtaattgttatatgtcacttaattatttgatctcagctcaatttttgtgttgttgtattaatgggaattgaaaacagtgtcattaggcgcagtgacgcatctaggattctgggttagtggggacaatttattttaaaaaataaaaattgataattatcattatcatatgagatagttgagtttaaacacaaagataaaaggtacaaaatataaaatttcaagataaatatgtgcattttattaaaataagaggatacatttacttactcttacatatacactgataataaaattcaaatacatgaaattacggaatgcaaaatataaaattaggaaatataaaatataatatttttggacaaatattaatggttttattaaaatgaggggatgcatttgcccactctcatttcaactggatccagcggtttgaatatgcaacacagaaatgtaattgaaactgacggcaatatatctcactcacttagccttcactttcttaatttcctgcaaatttacattggttgtctaatgtgcatcactgatgttggatattattggattacgtgcaaatgtttaattttgtattatactatgtaatatatttttctgttggcgtatattaattaattgattgagagttttgtacgtgttttaatttctttctttctttctttttaggtgggtgtggggttagagctagtatctgagcactgaagtatatttacgatggtgaagaaatgcgtatattacactcaagaattaatgccatatatgccaatcaatctcatccagtgttcaccaaaaatgtagtttacgcagctgacaaggtagctgtatgtcataattcattaagtagtaacaagtgaagacaaaccccacgttcagccaaaaagttttcatagttaacgatatgggaatgtaggccaaaccacgtgcattaggaggctagatttgtttcgagtatttattgctttcaaagttcaaacatttactgatatatggccacaattaatctacctgcaatgtacgtgaaatatcgagacagacatacataactttggcttcaattcattttaagtttatttctttttatattctacaattgaaattagaggtgtatttaataatcattatttatctttaatgccgaatttaattatagaggttataaaagtaaaattataattttaatgaggagaacaacgacaaaaagtatttctaattaagttctatcctatttgttttttattggctcaaagctaggaaatctctcacaaaccttcaggttgaaagtacgttgaagggttggtgccctttataagtgatctttttagttaggtatatgatgagaggaaggtcacaactgtaaatgcctctaatgctttaagtcaataagagtaagagttaagacgtagtggttagtgtttaaggcgtacttggtatatgatgctaattaagtcttctttataggcctttttcttagtgttcatatatatgacaggagattagatgagataacatgataatttgttacctattatggaatttaattatcattaagcgagatgataagaggttaattaactattaacatgtaatatgttacctattggtgttaaagacacaattaagtgtatcaatcatacaactaatatatatactagaatgtatgagtacatctttgtttgagaaattaaaaaaggaagtaattacattttagtttttggtattcaataaaaattagagaagaacagacacaaatgagcaactaagaaaaaaattcaataggcaagaatggtaggtattagaaatgctaggcatggggttgtagaaaccactggggtcgagctctaacatggcttccctttggcgcaaaattcagcagcatgcgcaccattgtagtgattggcgtggtggcatcatgtgtagctgaccacgatatataccaagtgtgacatttttcgttgttggtttatcttgcaagtcttagcctttttttttttttttgctttaggtgttgtcatcttttatcttttatgaaacataaacactcattattttaaacatttttatttatatcgcttatttttctttatctctctcttcctaccaaataaactctagctaccatatctatattttttctccttttactttcaattactaggtgttgcatagcattatggtgtccatcaaacatttttaaaacctaaataattaagtgaaatcatgcaaattttgaacttagaatctcagaaatgtgaatcacatgaaaattgatacacttaggttgttttctcataaaattcattaagttaatgcaatttttttttttttttttgcaaaaggacaataaatctacaagttattttaatattattgttttacaagttgttatattcaataatttttacacattaaattttatcaattcaactgttaaattaaaattgcttataatatataattaaataagttatttttttataaaatcttaaatttattagatacatcattagataaatttaactaaatgcataatatatttttaaaaatataagcaaaatattgactatgacattacataataaaaaatatttcacttatttaaaatttgatttgcatgatcttaaaatttgggtatgaatataataaattgacatcacaaaacttgcttatcccattaaatattttaatttgatcataatgagttctcaaacatatacattatctcatgtcgaggactaaacatctcaacataaaatttgtaaaactgaacatttattagtagtttgataattaatgatctaatagtggtggtttgataagcataacaacacttattaggataaacttttattccatttataaaacgtgagtttgtgtttaacttaaatctacaaaactaacttataaaagtaaaatttgctcctacttatatattttattttagtcatatttttagtcaatatacaatatccaatacgtgatctttggtcaaaatcaaaatattcaatggttaaataaattataaatgtaatttaatatgtataaaaataataccaataataatttctaataaattaataatgtaaaagttttattttactgttaatgcataattatttttttaatcttaaacatataaatatgatctaataatctatatctatagttctaatttctctccattaaaagaatctcatttgatatgtgtcctctctcccttgctatctgtgtatattacattttgggaaaagctcaatgagctatttacgtattttacataaattacaaatgtggaacatataaaacaagaataaaaaaaaagtcaatttccttcaactacataaacaaaaagtatttgtcaattctgaatcgagcatgatttttttgtcattgtttaagataaaattaggtgacaggttacatcccagaagtccatgtcataattagaattaatattacaattttaaaatgaaatacatttctcacatgaacctttctgcttagccgtgcatatgctgggcctgggccttattttcgatgggagggttgatttttctttggcgaatgctatatcatgcatatttttttttaagtacactccccttttattttaattattgtttttttattatcattagtcctctctatacccaaaatattcctttatgctgtttaatcattactcgggaaattaatttccagaaaaatgcaatttgatatcatgtaacatacaaaatacaaaaaatacatgaaatagaataatgcaatttgatagaaaaatagaatgagtgggaaggttgtgcagaagcgcttgttaatatattctgggccagatttaaaaaaaaaaagacgttttaggccttgggccgaactagtacacaaattagtttcactattgaattgtcccacagatgagtaattaaaccggtggtgaaaacatgcgtagaaaaccaagtgtatgtttaagataatttttttatcaacaaatattaatttgttaatttggttagaaatactaattgggagaatgcgagaaatgttagtttggaacctttgatttgactaatgaatttgtatacccttctatattccaaaatgccccttcgcaatggacaaagcattgtttggcctagttaatgcatcattcctggttttatttgtatgaagtccatttgttgaagtttcctatgcaaataaataccacataatatgatattgtgcatactttatagaggtacaactgtaaaagggtgctggtctggacaccattatcttggctctcaagattgggctgccaagggtcctttactactcgtgagctcaccaatgacaaaatgttatttcgttatatttgtaagtttaattattatacattaccagcttaaattttatattatcaattaatcaatcaaaaatcatgttagtactaattttatggtaggtattgaaaaagttaacaaatttaatatatatcataatttgtaatagatgacagtaaaactccatagtctcactacttgagtatatttattggactgctttcttgttttacaaatattttttcacttgcttgttcacatagggggtgaaaggagttattgctaagagctttgagagaattcaccgtggtaatctagttgggatggggatcatacccctctgcttcaaacatgatgaacacaagaagtgacgggtcatgagtgattcaactttgatcttccaggaaaagttggtgacacagaacctggtcaagatgtttatgtgtccactgacattggcaaatcttttaaatgcaagctttgccttgatgtaagtttcttaattcatgtgccttctatatatggtttatcatctaagattgatcaacgcacttgcacacagtggcttcactatgatatatacttatttagcaactcaatttgctggtggagctggcataccttgatcatggtggcattcttccctatattatccgaaacttgattaagcaatgggttttttctctttggatttctgaggcacaccatcaccatgtgaaatgtgtggaacacaataaattccattttagatttttttacgcatggatctgaatgtacttaatggcaaatcaatatgtttatgcaatgtttaattttcatgtattttatctattttatttaacacttcactgtactacaaaactgttaatctcaattatcatattacagtcaatccattgtttttattttttactaacttgagcgtgagacataaaactaaaaagatatattaaaaattttaaaaaaaattaataaaaatgaagaggttaattattgttagaatttatgatctattattttaaataataaataaaaaaccgaggcatgttgcaataacgtacagtaattaatataaacgagtatggatttaattaattaactttagctccaaaacattaactgtataaaatattattatcaaattattaatgataatcataaaaaactaagcctatcaccaaatattctgatatttcacttgcttttatagcagcctttcacgtactaatcattactttttaattgttatcaccccaatataaatcttgcaattttgttttataatatttctgatgaactaaaaaatattaacttaaaaaaattaataacaaacatcataaagttgtttgaaaagccaaaaatactcgttataaagaaaagaaaaaaacacgaatttgtttgcatttttattatttagaaaaatgacttcttatttcctttaactcatttatctttaaataaagtccaactaattatatttatttcgaacatatatatattgttggcaaaaaaatattaagctgagaaatgaaagggaagagaggaagcgtgacactgttccccaattttctgtgcttaaagtgaagcatttcgaaacagcaagacacgatgccttcggctcaagatccattctacgttgtcaagcaagaaattcaagaatctgtaagtattgtctcttttcccaaatcacctaggtttcgttttcggttcaatttggataataaagattacattctttttttcatagatcatgcgatgcacttagaatttctgtatgatttctctgttactggtattagtggatccgtgactttacgtgattcatcttctcaagcctgattcctgagctgaaattattaattgggatatttttgctcctaatatcttatgtaattgatctgagtatgccattttttaatgcaaattttggattttggatagaacccaactgcgatctgtaattggaggataacactatgatttttggttttggggttgatgtgtaatttattggctgattaattttcattttctggtaagattgataagctgcaatctacgtttcaccaatgggaaaagactgctgatgctggcgagcgatccaatctatcaaaggaagttcttgctagttgtgaaagcattgcatggcaggtataccagtcgtatttttttgaaccactgacaagttggttggcctataaatttttgttttcaatgagtttcattcattcttccaacgtggtactagtatcatttgtatgaaatgggatttgtgtattattaggtacacgttagagggatgtttggattatattacaatctaggtcagaggtagggaaaggtatttccttggggaaattttattgtggtaggaagtaaaaagagtgatgtgcacataactgtccaaaatgattctgacatatgctgcaatttatgtcaaatacatggtatttttttatcataaaaaagcagaagaatcgttcactctgatcattgtgaggatgcaaatctttgtaaatttcagctaaatatcattgttaaattttaatgttaattagttaatataagagctcattaataaatagtgaatgcattatattcatgtatttttattcatcattccattccctccccattgtattttttagccacccaataaagggagagcaagatcatcaataccttctcccttctttccctcttgttttcttttaatttgattttgccccttccctttgggtctgtaaggaaagatgaaggggagtaaaaatggagtgagctggaaatgttttgattttcactctttgttggttgttaaatcagagagtggaaaacagatagaaagttacttctaactctactagcacatcttttgtctagcctctctttgccacacatcttaggctatggtttttccttctgcaatacaacctattcaaactgctaaaatataatttttttttgataggaaggtggatgaattggacaaagcaatttctgtagcctctagagatccttcttggtatggcattgatgaagtggaggttgaaaaccggaggaagtggacccgtgatgctcgcacccaggtatctataacatgctgaacttgagtaagagttaggagaatacagtcaaattttttctcaacctaatgtatagttcattcaacattgttttattgctagcacctattagattcccttctctctctgttttttttttttttttttatctgtatggtgcttgtgaatgattgtaatacattattaggtgagcacagcaaagaaagcagtgcaagctggaaagggcttaaacaatgcttgtctaaatgggatgcacaaggaattaatgaggcttcctagttctcatcaaactacatctaaccaatatgctgcccaggataatgatgatttcatagagtcagaatcggacaggcagatgcttcttataaagtacttctttcctcccattttctctctctcactttatatggcattgaattaaatatttgtcttttgtcctgcttttacttgactttgtgcacatcttcttgatattaaacaaattgacacttgaccgtgacttttgtgcatgcaaggtggaaaatattctggtaattagtttgacctcttaagttgatttaattatattgtccactcctcctctatgctttctgagacataagtgggctcctctgtatgaaattgtggacacatgaacatatttttcttgtgcttctttacaaattataaatttctgttttttaatatcatctttgctaattattttagttttgtttggattatactatttctattaaataagaaatattaactaaaatgatggattcccctttttttctgtggaagaaaaagaaaatgggggagagtaaagactgtggcaggtagccttaacacagataaaggctggaaatacagtgctcaagtgttttcggaaaataatcaatctctggtttctattttatttttgtcttatattttatctattggtgctgataggagacaagatgaggagttggatgagcttagtttaagtgtacaaagaataggaggtgttggacttactatacatgaagagctccttgcgcaggtagatttgacatttgacaagtttttggtctgtgatcttactattttgcttagtgggagagccttgttgctgtcttgtgagttggatgttactggtgtaaatcctggaaacagcctctccccttgcgggttaaggctgcggatttctattattactcttgtgtttcaaaagtatgaaactaggcaaaactggtggtgcttatgtttcctttgagtgtcttcaatagtagctgtgttctcatgctgattttgtttccttgggaaatttctcattctaaaattgtcaaagccttgatgtttcaggaaaagattattgatgaactgggtaatgagatggacagtacatctaatcgcctagattttgtccaagtgagtttctgcttcgagtttccattattgcattaaaatgtatgatctatctggctgattgctgtgattaattagtaataatataaggagggcgagccctgacacagcagtaaagttgtgttttggtgacttgttggtcatgggttcgaatccggaaatagtctctttgcatatgcaagggtaagactgcgtacaatatcctttttccttacctttgcatagcgaggagtctttgggcaatgaaatatgtagtttttttttttttttttaatataatgagggaaatttttaatgttgaatgtgaaagttgaagtgtgtctcattgtttatgatatcagaaaaaagtggcaatggtcatgaagaaggctagtgcaaagggacagatcatgatgatattgggtttgctggtgctgttcattttcctctttatcttggttttcttcacctagttattgagatgaaccttgtcaatgctctgtttgtacatggaaaaagatctaaagcttctgtgaagatacaagattattgggagattcaatatgtttaaaaaatgaattgaagcctctttggtttgtcaaaggcagtagaaaattttgattatgatgaaaagagaagcgatgtacttggaaatatcagaagaggattttgtttcttaacaagatggattacaaatgtgatttaaattagttgtattcgttttaaagatgatttaaccttgcatgtaatgtttgatttctttttttttttttttttttctttttataacgacagcgtggtgttttgaatttatagtttcatgactgtaccaaaatagcttatgatctatcttcattcaaatcaacccattatttacctgctcactcctggtggcatgatgatcttgtcggttgctgttttgtgttggcacagtagaatattgaggggaggataacatgttatctaatttggccagatatttcaaggtgtaatttttatgcaattgataaaaaatgaaaaatgaaggctgttgtattaatcattttgtgtctgttcagtattggtttgcttaagagtggtagggtgaaaaataaggtaatcatagccttctttgaataaaagaaaaagtaaaaataaaagggaaattggatatgtatatatgttgtgcttggaagatttgtaagaagatctataagaagatataatgttattttgttggaaatgttttataaaaaaaatactggaatttgtagagaaattgagagattaaaattcaagaaataaaattgcaattaaatttcataaaaacaattcatgtgtataggcttataatcaacatcttcctaaaaaatctgatatgttaattttgttaaaggtttaaatatgttttatccataataaatacttaaaatttgtagttgttctttaataaatttttattttaagttgagtttctaataaaataataattttgtttgagtatttgataaatgaaaaaaattattagaacttgtcaatgataaaaaataaaattgttattttattagagagttaaagtaaaataaaaatttattagaaataaaatgtaaaaattaaatatttattatagataaaaatatatttaaaccttttgttaaactgggagaaagtatcactgtgatctgcataaatttttaattactatttaagaaatctaagagtttaattaatactttatatgattatatcattagatgataatattataaaaaattgtaaaaaatatttcaaatttaaattatatacttacggtgaatttaaaagcagaaagatataaataaacctacttaatgcattggaaagaagttagaaggcagggaagtctactcacatgtaaaaataaaaagtaaaaacccagaaatatcatactgatcaataatttcctttgcagtatgattaattggactggaataattttgtttctcttttgtaaaaggatttgaaacaattattttttgtcccgatctttcttttgatcttctacagacaaatattataaaataatgcaaattgagaagtgataaaaattaaaagaattcgtatctgtaacactcagacaagcataaggaacagaatctccaaagcaatttgagtctagattcttctttcctttgttcttgttctctaccacaactactatataccacacaaattatcttgcgtttctatgccttaaattacaaccagatatcaatcccatggagaataggatactccatccacccaaaaacaccttatattctgctattaaccatcattagacccattgcaatctgtgagaaattgtcacattgtaagaattttttatttattttaagacatgtaaatcaatatttaacatctgtaaacttatatcaatatataatatatacacacatttaaaaaattactttatactatcaaatgtttaattgcatggtgtaaataatttgtcctaaaaaatttcactgctattaaattgcttattctgtcacgcacaccccgctactatatatacccccaccactacctattcttctcaattcgctcttgctttgtttacaagtcctcctttctcacaggttcgtctctccttcaacattagatcttcctagctcatttttaattcctacttggtctaaaaaattgtgtttgtgaaagtttgagttccatgtttaatgtctctattacacaagaaagacattttattctcttttttttgctactttccttacgaattatatgtacttgcaagatgtgaaggaaagattttgattttaatccataaggttgacataactgtgtaataatgcaccattgcgttcatatatgagagaagatgtatttaatgaaaaaatttgtatttgatttcttctttgtgcaaatttttttgaatcaaaagcagtcacgcacctcgagtgagattagtttctaacttaatgaattaagagacattcatgatctctgacacaaaacaataaaacagcgtgaaggaaagaaatgcttaataggaggctttagatttgttatggttagatatgttgatattggcatgcatgcatgaacatgtcacatgtggcttatggtgttgtacattttgttgcagctagggtggtgattagtgtacatatatatatatggttgaagtgggtatttatcacatccctacgagcactttcgacccatttgcggaggcaaaagaaacagatgcccccggggcaaaagagtatgtgcatatccgcatacaacagaggaatgggaagaagagtctgaccacagtgcaagggctgaagaaagagttcagctacgagaagatcctcaaagacctcaagaaagagttttgctgcaatggcaatgttgtgcatgacaaggagcttggcaagattatccaactccaaggtgatcagcgcaagaacgtttctcacttcctcattcatgctcgccttgttaggaaggatcagatcaagattcatggtttctaaccaactaccactaccacctttcttgtattatgaaattaaacctatggctgcgtttatgaaataactaaggagtttgagtttggaatatttggtcattttctctctgtatgattgaaaatccaagaatagtctgagagttgttatatataatactacatgttgtgctttcatggaccatgttttaagctatttttatctgattttaatttttaagagtatcagtttaacaattctaaatttataagaccactataaattcgaacaaaataagttgttatatatgtgctaatatatatgaaataatgcgttgcctgcccttcaagaatcacttttaattttaagattagaaaagaaaagaatataaacaagaaccaaggctatttacttgcatgtgtgagacatttctcttgcctcgtaatcattagttctttgatgcaaggttgccttttttgagataagaaaaaaactttaatacaatgttttttgtacatttggtctacttaacacttgatcgcatgtgttaacaagattttatagttattatgacaaaggaaaatgtgtgggagatactttgatgttttaatatgcacaaatccgtgaatacatgcatgtatgataaaattgtcttatatatgattaaataataatttatgaaattttacattattttcaatgttattaaaattggttcgaacctaccggttgaaccggttgaactaggaacctagtatcaatcgggccgagttggctaatgaaccggccatgcatatggcccaaagaaaaccatacggttttaggaagaaccgaaaatctgaccgatttttaggacccaaaccgagttggtgaagaaaaaaaaaagcttcagacgcataaaacgcaaaaaaaagcttcaacttttcttcatcttcaattcttcatttgttcacggcttagctcagggcctcaggcactcacgctcactgcagcagggcatgccatctccatcgttactagcgtgtgtgggtgcaacacggtgtagagagtgacgatggaggaagtgagaatgacttcggacggagcaacgttgatggcgacgaataagaggaaacagtcgtggaggaagagagagaacaacctccaaatgtagagatgatcgaagagaagattatatatatatatatatatattgagagtttagttttttttagttgggcttgactagatgttgcttcttgtacctcgtttattattttatgcaatttttattttgcattgcgaattagcttattgttattttggatttttgagtatgaaattatggatgaacttttcttaatcaagtaatattagttatatacatatatataatataattttaatttttttaatacagaccggctcaaaccaggccaattactggtccaccggttggatcactgacctactacctcaactgggtcaataaccagaccgatttttataacattgattattttctttcgccgagtttatgttaattatctcttctttcaacctatcttttgattataattaaatcgaatattacaaaatacttaaatttgttcatcaatccaaattattttaattagagtttctccatatcaattacatgccaacatattttacatgatatcaagagaacctctctaataagttaaatgtatgttttcaaggtctaggcatgttcatttatttgcaacaaattaaagtaactttgagatctcttttattagttactttgatacattttacaaataagacaacctagctcttacaatttcaaatgactagagtaatcaaataggccgtgtgatttgatataccgagttgcactactctttaattaaacaatacccaataataacaggagatgggagacaccttaataacacgtcattctcactcacagatgattatgctcctttaaggccacaagcatcaaggaagcaatagtgttctcggcatcattttttcgagatttttcatcccgtcatgtgaatgaaggatactgttgctatctgaacaacgcaaacatatcacaatgctagtgttgacagcacgtagaagagagagttggcctggttggagatcagggtaagtgcgataaaggttgttggtgatggtgtgattgagaggtggagtctccaataaactccaaatgctcgtaggagacaccctctttagaggagaacttagtgagcttctaattaatagaaataatcattcatacataatataaactactaccttttacacataattcatttccttgcttttacccatgccatttccaccctctcttagcactgcaaaggactatactgcttaagagttcaatgcatgacacatgcaaaaaaacatttgtatgctttaataaccttactagaaattttgacaagcgaataatcaaaagggtgcaataagagtttctagtttataaagagaaataagggaacaaagacacaaatgaaaacgcagtaaatgaaggataaatgtacaagcaaagaaaattggtattttattatttcttgaaagtgttggaagtgaataatatcttcagacccttctaaattgacatagaggattttgagggtgatcattcatagatcttttacagtaattatcaagattgaaataacagaccatcacatcacatgtacagcatcttcgttcacagcttgacaagtgcaaaccagagaagagaggagactctgaaggaccaaacctgcagcatatcatgcagtttgagatcattctgaagcacaattttgtcccatccattggtcaagtcgtagaagcagcttcttgaacccttcttgaaacacatgttgcactctctaagagaaggatccaacacaatgacgtgcatgccagaaatcctttcgttttcctctagaaaggactcctccttttgtgtcagaaaattgttggcaattttcatagagaagctggcatcgtttaggtttggattcaagtctgactcacagagtttcttctgtatcagcaacttcacctcacatcccttcatttcttgaatcttttctttaaatggacttggcaattcatcactgctactgctagcacctttcgtggacgtgccttcttcttcgctctttctttcttcttctctctttctttcgtcttgtcttctgaggatgctattcaaaatctcagtgtcatcatcctcgaggaatgaaaataagtgaggattcctttgttgttccagtttaagcaaggcacggatacccttcctcaaaaatatatcatccgaatctccttctttctttacagctcctcccgaattcttttcctcatttgccattgttatgtatcaacgttgcagattagagaagttttccttactctactctctctgtctctctctctatacctctgtatatatatatatatatatatatatatatatatatatatatatatatatccatgagtctagatatagtctctgtctaataaaaaaattcagttttttttttggacgggaaaaaaaattgagatattgataactgaatcaatttaataaggactgcaaaaagtaaacaataaaaagtgaaaaaaaagtattagattgaattgaattttaataatatttagataaatagtcattttcgtattaaaagagcctacttaagatatttatggatgaatttatgtattatatgaaacaaaaataattatttatccaaaatataatttaatctttatctttttaatgtaagaatattttattcaaaatagaagactcagatcaaaatataaccattagattaatccttacaaaacaaaaataaatctaacttgatactaatacattcaataatattaatagcatcttagcaatagattttaaactacacacacccaacaatctctaatcattgtgtaaaacgaaaaatttacgcaatcataaaaaagtcaagttagatccctcgaattgatcttcattactaatgtttgatcataaaaaaatttacacacccaacgtactaaaaaaaattataatttattatcaatttagttcgtaacaaaatcataaaaaataaatatccctcaaattgatcttcattactaatgttaagttaactccaaggctatttacttgcatgtgagacatttttcttgccccgtaagcattagttctttaaagcaaagttgacttttttaagataagaaaaaaaataaaatgttttgtttggtccacttaacatttgatattgcatgtgtaacaagattttatagttattatgacaaggacaaatgtgtgctgagatactttgatgtttaaatatatacaaattcgtgaatacatatatgtttgataaatgtgtcttatgattaaataataattttttaattcttatatcattatcttttggtctagttcctgttaattatctcttccttcagcctagcgtttgactataattaaattgaacagtacaaaatacataaatttgtttattgatccaaattgtttttaattgataatttacgtacattgttattatttataaatgtaacttttatttaagtttctttatatatggattacatgtctacatattttacttcatatcaggggatgctttccaataagttaatatgttttcaaggtctaggtagattcatttgtttgcaacaaattgaagtaactttgaaatctcttttattaattgttttttgatatattgatacattttacaaataaggcaacctagctctctcaatttcacgaacaaatgatcaaagtaatcaaataggcctcgtgattacacataccaagttgtactgttattggaaataatccaagtcccacatcgactagagatagtgccaagtcaaaatatataagtggagaacaatcccttaccctatgagctaacttttggggttgagttaggtcaaaattcacattctaatacgatatcatagcctatcctaaatccattaatgggccacccaccatgttatccacgcaccaagtccaaaagtgctggacgtgaaagggtgtattgggaataactcaagtcccacatcggctagagatagtgccaagtcagagtatataagtggagaacaatccctcaccctatgagctagcttttgggattgagttaggtcaaaatccatattctaataactgctatctaaattataatcatcaagtgtttttttttttggtccaaatcatctggtgtcaccatcggctggaaaacatgcccaattacctaccatagtcacaaatgacaaagcaactttcatcatattgaattatacaaagaatttaaaatttttccactattgcaattgtaatttaaaacctttattattaatcattaataaaacttataattaattatcatcatgattaattgattgcaacgaaatctaacaagtatttgagataaatatcattcattatcatcgtgatggattgataaacgtatgcaaggacctttgatgccttcactaatctggcatcgcgattgtgtttaaggtataaaatagcaacaaataaacaacgatattattcaataataagtactacgtacgaatcactgaactctttcagcattattctatgttttccaacaaacacagaaagaaaaaaaagactcctaaagcaattgaggttttgaaaatggctgtgacatcaaagtaattaattaaaacgtttaaatatattttctaaattaatgttttaagttttttaagtaattaacaaaaattcttcacgctataaaagaaaagtctatttatctaaataattatataaaattactttaacaacaataaatactatactaatatttttatgaaatttaatttacttatatttattttccaattttcagatgttatattaacatgtaaatcaatatttaacatctgtaaaattatatcaatatataatatatatacgtacatttataaaattactttatactatcaaatgtttaattgcatgctgtaaataatttgtcctaaaaaatttcactgctataaattgcttattctgttttgcacaccccgctactatatataccccaccactacctattcttctcaattcgctcttgctttgtttacaagtcctcctttctcacagattcgtctctccttcaacattagatcttcctagctcatgtttaattcctacttggtctaaaaaattgtgtttgtgaaagtttgagttccaagtttgatgtctctattacacaagaaaaacattttattttcttttttttcctactttccctacgaattatatgtacttgcatgatgtaaaagaaagattttgttttaatccataaggttgatatagagatgtaatgcttcattgcgttcatatatggaaaaatgatgtatttagtgaaaaaattatattcgatgcaaaaaaaaaattgaatattttattcagcatgcatatatatctcaaacaacgttgtcactggttgaggttgttgctccaaatcatctggtgtcaccatcggctggaaaacatgcccaattacctaccatagtcacaaatgacaaagcaactttcatcatattgaattatacaaagaatttaaaaattttccactattgcaattaatcatgatgataattaattataagttttattaatgattaataataacggttttaaattgcaattgcaatcaattcattaggttagaaactaatctcactcgtgatgcgtttatatatggaaaaatgatgtatttagtgaaaaaattgtattcgatgcaaaacaaaattgaattagtaaccatcacgcaccatgagtgagattagtttctaatctaatgaattgattgcaattgcaatttaaaacctttattattaatcattaataaaacttataattaattatcatcatgattagttgatagcaacgaaatctaacaagtatttgagataaatatgattcattatcatcgtgatggattgataaacgtatgcaaggacctttgatgccttcactaatctggcatgcagcacagggcacagggtaattgtcttcggcaatagcatccacaaagcattccaattgctgaacaaggggaggggcattgtggcgaacgcagtggcctggtgacggtgttgtttgtttataagatatattttatgaaattaataacatattcagataaaaaaatttaatttacttgaatagaacattaaaaaataatttggattctcagttacggagccattgatggtgatggatttaggagggcagacagtggtaccctatacacaggcaattaggttgtgataccatatagaagaaaagaaagatctgaatttattgatgtataagtgaagtacgagtcagtttaatttgttacataaacaactaaaggatatataacattgttatgcaacaaatgcatagagtttattttttgaattaaagataaactgaagaagtgcttgtagatattcagagatctagggagagctagttccaacaaacttcacctcacatcccttcatttcttgaatctttaatttcttcacatggccttgtaattcttggaatctccaacattattattagcactgctattgcaagcacctttcgtggacgtgccttcttcttctctctttctttcttcttctctctttctttcgtcttgtcttctgaggatgctattcaaaatctcagtgtcatcatcctcgaggaatgaaaataagtgaggattcctttgttgttccagtttaagcaaggcacggatacccttcctcaaaaatatatcatccgaatctccttctttctttacagctcctcccgaattcttttcctcatttgccattgttatgtatctacgttgcatattagaggtttcatttctctagctactctttctgtacctatatatgagtatacactaacctaacaaattttacaactaatcaaatatactaatttaaaaaatcaaagcggaaaaactggaatattaccaaatcatccgcagtatatataggtactatgagaataagtcttcttaaagaccagtaactgatgcgaaattatcaagaaaaaatatatttatattctttcttattttataatcttctacctaattttttgttgaattgcattgaaattgaaatatttacaagattgtaattcgaatttagaaaatataatttaaatttcaaaaataatatgttttggtgatgtaaagttatagagtatcttattttaaataataactttattcaaaacaaataaaacacgttaattttaatcaatcataatattttgtttttattggatttataattttaattttaagaatacaattttaattaagattgataaatattactgtaattatcaaaagtttaaaattaaaatcacactataattataataaaaattaataattttaaaaacaaaaattataaataaaaatttaaaattaagaaaaaatttctcaatgtgaaatcacatattgttcaaggcataacgtgtttaagaaataattgatttatttgaattatgtgctcgtttttataatttaaattatgtatacgtgattagactttttcttataaaaaattaatattactaatatactttataaaatatttttggcatatttttatgttggtaaaaaaatttattgtaaagaaaaaaaattgtagatttatttttttagtttatatatatttagttttgccaaaatttaggaagaagattagggaaaaaaagaaacaattaataccaaaattattttaatttgatgttctaatttttattttactagtatgtaagtccatgcaatgcacggggaattaataataatattattattgttttattttttaacataatatatcttttattaatatgtaaattttaaatgtgttttatcttagtacttattattaaaaaaagaactgagtcttaataatattagtgaaattgcagtaaaaaaatatattagtgaaaataagtatgactataggccataaagcattccacttgccgaacaagggtaggggcattgtggccaaacgcaatggtggaggtaagagacctggccaggttggagataggggtgaaagtgagtcaggccgtctatcagggacctttggcttgacatatttaagggctgacatgacttatttactataaagattaagttaaggctttttgaaaagtctgtttaaataaaaatgtcaggatcaaacttaaaaaaaaacatgttaggtatatcaggctgacctatttattatatatatatatatatatatatatagtaaaacttaaaatagtatatttatttttctaaaaatatttttccttattatgaaggtggatgatcaatcacttcaaaaaattatcttgaaaatttcatatatatatatatatatatatatatatatatatatatatggttgaagtgggtatttatcacatccctactagcactttcgacccatttgcggaggcaaaagaaagatgcccccggggcaaaagagtatgtgcatatccgcatacgacagaggaatgggaagaagagtctgaccacagtgcaagggctgaagaaagagttcagctacgagaagatcctcaaagacctcaagaaagagttttgctgcaatggcaatgttgtgcatgacaaggagcttggcaagattatccaactccaaggtgatcagcgcaagaacgtttctcacttcctcattcatggtttctaaccaactaccactaccacctttcttgtattatgaaattgaacctatggctgcgtttatgaaataactaaggagtttgagtttggaatatttggtcattttctctctgtatgattgaaaatccaagaatagtctgagagttgttatatatattactacatgttgtgctttcatggaccatgttttaagctatttttatctgattttaatttttaattaagagtatcagtttaacaattctaaatttataagaccactataagttcaaacaaaataagttgttatatatgtgctaatatatatgaaataatgcgttgcctgcccttcaagaatcactttaattttaagattagaaaagaaaagaatataaacaagaaccaaggctatttacttgcatgtgtgagtcatttctcttgcctcgtactcattagttctttgatgcaaggttgccccttttgagataagaaaaaaactttaatacaatgttttttgtacatttggtctacttaacacttaatcgcatgtgttaacaagattttatagttattatgacaaaggaaaatgtgtgggagatactttgatgttttaatatgcacaaatccctgaatacatgcatgtatgataaaattgtcttatatatgattaaataataatttatgaaatctaacattattttcaatgatattaaaattggttcgaatcggccagttggagcggttgaaccgggaacctagcatcaattgggctgagttggctaatgaatcggccatgcgtgtggcccagagaaaaccgttttgggaagaaccaaaaaccttgccgatttttaggacccagacggggttggtgaagaaaaaaaaaaagcttcagacgcacaaaatggcgtcgttttgatgccccagaaaaaaatgcttcagacgcataaaacccaaaaaaaagcttcaacttttcttcatcttaaattcttcatttgttcaaggcttagttcaaggcctcaggcactcacgctcactgcagcagggcacgccatctccgttgttactagcgtgtgtgggtgcgacgcggtgcagagtggtgatggaggaagtgagaatgacttcggacggagcaacgtcgacgacgacgaatcggaggaaatcgtcgtggagggagagagagaacaacctccaaatgtagagatgatcgaagagaagaatttggtgcaagggagaagcaggaagaaaaaattggtggacgggggcgctgcagcaagccaaaatgagaagattatatatatatatatatatatatatatatatatatatattgagagattagttttttttagatgggcttgactagatgttgcttcttgtatcccgtttattattttctacaatttttattttgcatttcgaattggcttattgttattttggatttttgagtatgaaattatgaatgaacttttcttaatcaaataatgttagttatatacatatataatataattttaattttttaatatagactgcgtcaaaccggaccaattacttgtccaccggttggaccactgacctactgacctactacctcaactgagacaatgaccggatcaatttttataacactgattattttctttcgccaaatttatgttaattatctcttctttcggcctatcttttgattataattaaatcgaatattacaaaatacttaaatttcttcatcgatccaaattattttaattagagtttctccatatcaattacatgccaacatactttacatgatatcaagagatcctctccaataagttaaatgtatgttttcaaggtctaggcatgttcatttatttgcaacaaattaaagtaactttgaaatctcttttattagttactttgatacattttacaaataagacaacctagctcttacaatttcaaatgactagagtaatcaaataggccgtgtgatttgatataccgagttgcactactctttaattaaacaatacccaataataacaggagatgggagacaccttaataacacgtcattctcactcacagatgattatgctcctttaaggccacaagcatcaaggaagcaatagtgttctcggcatcattttttcgagatttttcatcccgtcatgtgaatgaaggatactgttgctatctgaacaacgcaaacatatcacaatgctagtgttgacagcacgtagaagagagagttggcctggttggagatcagggtaagtgcgataaaggttgttggtgatggtgtgattgagaggtggagtctccaataaactccaaatgctcgtaggagacaccctctttagaggagaacttagtgagcttctaattaatagaaataatcattcatacataatataaactactaccttttacacataattcatttccttgcttttacccatgccatttccaccctctcttagcactgcaaaggactatactgcttaagagttcaatgcatgacacatgcaaaaaaacatttgtatgctttaataaccttactagaaattttgacaagcgaataatcaaaagggtgcaataagagtttctagtttataaagagaaataagggaacaaagacacaaatgaaaacgcagtaaatgaaggataaatgtacaagcaaagaaaattggtattttattatttcttgaaagtgttggaagtgaataatatcttcagacccttctaaattgacatagaggattttgagggtgatcattcatagatcttttacagtaattatcaagattgaaataacagaccatcacatcacatgtacggcatcttcgttcacagcttgacaagtgcaaaccagagaagagaggagactctgaaggaccaaacctgaagcatatcatgcagtttgagatcattctgaagcacaattctgtcccatccattggtcaagtcgtagaagcagcttcttgaacccttcttgaaacacatgttgcactctctaagagaaggatccaacacaatgacgtgcatgccagaaatcctttcgttttcctctagaaaggactcctccttttgtgtcagaaaattgttggcaattttcatagagaagctggcatcgtttaggtttggattcaagtctgactcagaaagtttcttctgtatcagcaacttcacctcacatcccttcatttcttgaatcttttctttaaatggacttggcaattcatcactgttactgctagcacctttcgtggacgtgccttcttcttcgctctttctttcttcttctctctttctttcttattctcttctgtggatgctattcaaaatctcagtgtcgtcatcctcgaggaacgaaaataaatgaggattcttttgttgttcctgtgtaagccaggcacggatacccttcctcagtatcttatcaatcgaatcaccttctttctttacagctcctcctgaattcttttcctcatttgccattgttatgtatctacgttgcagattagagaagttttccttactctactctctgtctctctctctctctatacctctatatatatatatatatatatatatccatgagtctagatgtagtctctgtctaataaaaaaattcagttttttttttttggacgggaaaaaaaattgacatattgataactgaatcaatttaataaggactgcaaatagtaaacaataaaatttgaaaaaaaaagtattagattgaattgaattttaataatatttggataaataattatttttgttcgttatgaaaagattaattaagatattcatagatgaatttatcaatattatatgaaacaaaaataactatttatctaaaatataatttaatctttatcttgtaacaatattttattcaaaataaaaattcaaaaaaaaaatacataatcattaaattaatccttacaaaacaaaaataaatctactttaattttattactacttaatacatttaatacattcaataatattaatagcatgggagcaatagatttcaaactacacacccaacaatctctaatcattgtgtaaaacggaaaatttacacaatcataaaaaaatcaagttagatccctcgaattgatctttattactaatgtttgactataaaaaaatttacacatccaagtactaaaaaaatttataatttattatcattttagttcataacaaaatcataaaaaatagatatatatccctcgaattgatcttcattactaatgttaataagttaactccaaggctatttacttgcatgtgtgagacatttttcttgcccagtaagcattagttctttgaagcaaagttgacttttttgagataagaaaaaaataaaatgttttgtttggtccacttaacatttgatattgtatgtgtgtaacaagattttatagttattatgacaaggacaaatgtgtgctgagatactttgatgtttaatgatatacaaattcgtgaatacatatatgtttgataaatttgtcttatgattaaataataattttttaattcttatatcattatcttttggtctagttcctgttaattatctcttccttcagcctagcgtttgactataattaaattgaacagtacaaaatacataaatttgtttatcgatccaaattgtttttaattgatataatttacgtacattgttattatttataaatgtaacttttatttgagtttctttatatatggattacatgtctacatattttacttaatatcaggggatgctttccaataagttaatatgttttcaaggtctaggtagattcatttgtttgcaacaaattgaagtaactttgaaatctcttttattaattgttttttgatatattgatacattttacaaataaggcaacctagctctctcaatttcacgaacatatgatcaaagtaatcaaataggcctcgtgatttcacataccaagttgtactgctatctaaataataatcatgaagtgtttttttttttttttttttttggcatcttcaacagccaaggtaccaccctcattggtgtatattgttagctccatattgatgggagacttcatattaacagaggggatagaacatccaattttatttaaggcatcctttgaaactttgaacttttgcaagatacttttgagcagaggtggaggacacaataagctccccgtttatatagattagcaaagcaatacttaagtctccattccttgaatattttatatggcatgcatatatatctcaacatctggtgtcaccatcggcatgcccagttacctaccatagtcacaaatgacaaagcaactttcatcatattgaattatacaaagaatttaaaaaatttcaactattgcaattgcaatttaaaacctttattattaatcactaataaaacttataattaattatcatcatgattaattgattgcaacgaaatctaacaagtatttgagataaatatcattcattatcatcgtgatggattgataaacgtatgcaaggacctttgatgccttcactaatctggcatgcagcacagggcacagggtaattgtcttcggcaatagcatccacaaagcattccaattgctgaacaaggggaggggaattgtggcgaacgcagtggtgacggtgttgtttgtttataagatatattttatgaaattaataacatattattcagattaaaaaaaataatttacttgaatagaacattaaaaaataatttggattctcgatcagttccggaaccattgatggtgatggatttaggagggcagacagtggtaccctatacacaggcaattaggttgtgataccatatagaagaaaagaatgatctgaatttattgatggataagtgaagtacgagtcagtttaatttgttacataaacaactaaaggatatataacattgttatgcaacagagttattgtttgaacttaaagacaaatgcatagagtttattttttggatcaaagataaactgaagtgcttgtagatattcagagatctagggagagctagttccaacaaacttcacctcacatcccttcatttcttgaatctttaatttgttcacatggccttgtaattcttggaatctccaacattattattagcactgctattgctagcacctttcgtggacgtgccttcttcttctctctttctttcttcttctctctttctttcgtcttgtcttctgaggatgctattcaaaatctcagtgtcgtcatcctggaggaatgaaaataagtgaggattcttttgttgttccagtgtaagccaggcacggatacccttcctcaaaaatatatcaaccgaatcaccttctttttttacagctcctcccgaattcttttcctcatttgccattgttatgtatctacgttgcatattagaggtttcatttctctactctctctctctgtacctatatatgagtatacacaaacctaacaaattttacaactaataaaaatataataatttaaaaaatcaaagcgaaaaaattggaatactatcaaatcatccgcagtatataaaggtattctgagaataagtcttcttaaagaccaatgattagtaaatgatgcgaaattttcaagcaaaattatatttatatatatattttttataatcttctacctaatttttttgttgaattgcattgaaattgaaatatttacaagattgtaattcgaatttagaaaatataatttaaatttcaaaataatatatatgttttggtgatgtaaagttatagagtattttattttcaataataactttattcaaaacaaataaaacacgttaattttaatcaatcataagattttgttgttattggatttataattttacttttaagatttaagaatacaattttaattaagattgataaatattactgtaattatcaaaagtttaaaattaaaatcacactataattataataacaattaataattttaaaagcaaaaattataaataaaaatttaaaattaagaaaaaatttctcaatgtgtaatcaaatattgttcaaggcataacgtgtttaagaaataattgatttatttgaattatgtgctcgtttttataatttaaattatgtattttttataatattgtttgtaaacgtgattagactttttcttataaaaaattaatattactaatatactttataaaatatttttggcatatttttatgttggtaaaaaaaattattgtgaagaacaaaattttgtagatttatttttttagtttatatatatttagctttcccaaaaattaggaagaagattaggaaaaaaaagaagaaacaataccaaaattatttttatttgatgttctaatttttattttactagtatgtaagtccatgcaatgcacggggaattaatttattattgttttatttttttaacataatatatcttttattaatatgtaaatttttaaatgtgtttatcttagtacttattattaaaaaaagaaatataagtcttaataatattagtgaaattgcagtaaaaaatatattagtgaaaataagtatgactatagaccataaagcattccacttgccgaacaagggtaggggcattgtggccacgacgcaatggtggaggtaagagacctggccgggttggagatcaagctaagtggtgacttctaataaaagcaacttatcttgataattaatatccatttgacttttttttaaatgtattttataaaataaattttatatattataattaaataccaaaattgtgtcgtagtatataataaaatgtatttgttttaatatttatataaatgctatattaataatattaaatattctatcaacatgtcaagtataatttaattatataaagtcaaaattagtatatttctaattctaaatattgtattaatatacatttaaattttccttcatcttgaatggaattttttttttaataacattgtatttgaattttatacttaatatatttgttaatgctccattcaactaaattattatttttttatcccaatatcttttttattttacataggatatatgatgaataaaatagtttaatagtcaattacataaatttcttttataatatcattaaatcatatcttattatcatgtacgataaattttaatattttataataattattttgaaagtcattccaacttgatttgtaattaaagaatactgtaaaattattttataatgtcagaccatcaaattcttctatcaatattgctttttaagtataacttatctagagaaattaatattttataattttaatttctatatattatatatcacattaatattcattcaaaattttctttttgaaaacatttttttaaactaatttttataaaattttaattctttaaaaaaatcatattattcaagtaaacacttatttattttctacttctattaaaatttactaatgcaattatgtcaaacaaaaaattgaattaatttttaagtataatttaattatataaattatgaattaatatatttcaaagtctatattatattaatataaattaaaattttattttattatattttttgtcaagtaaaaatttgaattaatttttcaagtataatttaattatatatcaattatcaactaatatatttcaaagtctatatatcaaattaataaaaaaaattgtagtttttttgcaataaatagaacaattttatcacacatgtattcacaaagttgtgcataattaaacatcaaagtatctccctcacacttaaaaagtttttgaaattattcatgttttttatacttattctactcaataaattatttaaaaggctaagagtttttgaatttgtttgtattttttatgtttaatagatttcgtgaaattaaagatatttgaaaatttcataatttatttgattcacttaattatttaaaataatattttgggaggaatgtgtttaatttaattaccttaatttaaaataatatttcatgattagtaattaaaatgaataattggggtttaattgaatagagaattgaggagaatgtaaataggtatctaaaatcatgaacctaggtctcttaatttgtcagaaacgttcattagttttcatgaacctatgataaatttgttgtttgggagtctctaatggacttaagttcgttgttactattgtaaaataaatttattatttaacaatatattttacggaccatacatatagtgtaatatattttatggaccacgcatatagtacatgcttaatacttggtggccaaccataacaagtcataagtagaggtagaaagggctcaaggcttaatctgatttatttattaaaaaggtttgacttagacttttttaaaaagtttttctaattaaaaagataagacttaaactttaaaaatagcttattaaacttaatacattggcttattcataatatatatatatatatttaatatatgcataaaattattaatattaacattaataaaagcttgatacatttgttttctatttaggtttgttggcctagatttaaaaatattattttgatataaaagaaagacttttataatcaagattttatagtttaaattttattgaatttatataataagaatttaaaagatggcatataatattatgtatttataagatttgaaaggatttcatatatttttagaaaacatttaaaatcacaagagtcgtgaaaaaaactaatcaagaaatgttaatgtttagattaaacaaagtaaaaacaatacaattttttaataatcttttagtagctgattaattctaacttcatattcttcacatatctaaaactatactagtcctttatgtattatcatcttcttatccctactcttgcatttgaacaatagactcaaaaaattatggtcatcattatccagtaatactgaagatgaagatttgaatactagctagttcaattgaaaatatgacgggtgcactgttcagcgaacaacgatacctgttgatcagagtgggtaaaacttcatttcttaaatttggagttcccaatacctatatacattagcttttgtctttttaactcaattttgacgatgtcgatgtatcataccatgggttagttgagttgtttttgttgtttgcaatccacgtgctttgaccccttgcaaggtgactagtcgtcggcatgcaaatatttgtctttttttctttttttctttcgaattttgacagatttgttttaccgtcattaacgaaaacatattgtgtttgttgctaaaacatatcttacatttgttttttttttcttctgaaaaaaaattaatgaagactccggaaccattatccttaaattaatgaaggagtactttatatgatttttatgtttcaatataataaatattaattttttcttacttttatttcctagacaagtatattcagttgttaacatttcccttttcagctagcagtgtttgttatcatatatacgacgtcacgcagagttcctactcctatatatatatatatatatataaatataaatatatatatatatatatatatatatgtgtgtgtgtgtgtgcaccaagctgtatatgataaaaaaaaatactagcagttctagaaagcaagcaatttaaaatggaagatgtgaacacgcggaaaattaagcaaccaataatctaacacgttttgatactaataaaccatttgaccatataatgtgagagtttctctgaatgaaggcaacgcgtgaccctaaatattgataaacaaataaggaaaagatatttttgaagcggcaagccaaccttgaccatacattaattatagtggccgcaattaccagaactatatatacacaacggggtggcatcacataatcgtttgagagtaaatttgtattgtatatttctgatcattagttattattctcaatagctatgtacctctcaaacatcttcgggtgcttctccgagggctcaccagaagaatccaaaagatacacatgcgatgggaatgtttgtgttctgaaaaacccgaaggcaaacatggggaaaccacagacattatctaacagcaagaaatcaagacatagccttcggatttcgtttgctcgtcgtgccaaaaggtcttctagttgttagatatatatatatatatatatatatatatatatatatatatcactcttgtgaatggagagagagaggctcaggttctgcatgatgccatcagcccatcaacactacagggttacgttttattggtttcatatttgattctttgatcgctttcatctgttgtacaacggcgtagcttattctatatcatttataaattctacctctagtaatcttaaattcttaaagatattttaacttttatttttaatgttcagttattaattaacaacttatagatctctcatatgctaccctgtttgtgatccttgtgaagtatactttaaagatacgggttgattttgtagcttaaaagctctttagtatatgtattgaatcaatataagagtttggaaaattctgttcgacttttctacttgattaagtaatgcttcttgtgtgagtgaatatatatatccatctagctattttaaatgttcatccggtatctcatttatttttatctttcttcctattgcatcataaatactcatcaaagatttttcttctgtatttatgtcacagaaacagttggtaatgtacattaatgttacaaaggatttgaaaatgccaaaaatgaagatagagtagttacacatgagcattttcatcactccaaaatgccctgacagagagagctaaactgacttttttttttttgtttacaaacgagaaaaaaggaaaacaaaaaacaaccaacaagcctaaatcattattctaggaaacttaatccccaaagcatccaccataagactatcctttaacatctgagtctgaggagcttcatgcaacagctgaagctgattcgtgcattgatttgcttcccaaaaccaatgctgagaccttaaagcaggaagtttaggatttgtttagatataagttaaaagttcttttgaaaactttaattttttattagaaatataatattttttttttcagtagagaagctctcaaaaagacttctaaccttatatctaaacagactctcaatcatctcaaatgctggattcctagcacaccaaataaaccacattatgatggggattagaattccctgcttgcaaatcagctccttcagagcatcaagaccgtcagggacatgcaactgaccaaatccgcggttgacaaagctattatttattcaattactttcaaaagccctaagttccactttaggggtgagagtgagacaagggatatgggaataagtaacgcaatgaactaatgggtaacttctcgccaaatccatattaaacaaacaaacgtagcttaagtctatctgttaaacaagttagactattgttttaatttaaggtttatttagttcaaaaaattaaatcttaaatcatttaaaaaatctttcagacataataaatctgtgtatttgaatcataattataattatattaacatttcactgtgcgtgatatttaattttgatattttattcttgtttgtatgttttttttaagtcttgctaatatatttaattaaaaacttaaactaattaatttacatataattttaagttcattagattatttaaagggaagattctaagctactttaaaaggttttattacaaaggagattttactaattaggatttctaggtcaaaattttaaaagattaggtcagatatttaaaatatctatattatataaataggttagactcggattttaggtttaaaaaatatattataatcaggttttataaatccttgtctaagacaactctttgctatccttaaaagtgactaaaaattattaaaaaatgatttaagtcaatcatcttccaatatatgtgaataaccacattatgtaattccaaccaaacatgttacatacaagtgtgagcctgtttctcgtgagccgcattagatcgtatttttaaataagctaaactcatcaaatttcatatgatttaagttattaatctttataaataacttcatttggtcttaatctttcaaataaattgttaattttaattcttatcaattttaatttttttaagatttgttcatattattttttaactatgacatagatataaatcatctagcatcaataattatgagataatatgtaatgcaacaaattaatgtcacattgtcactaaaatagtgataaaagtattttgaaaatgttaaaatttacaataactaaaacaattttagaatctttaaaaaaatagaaaataaaaaatgaaatagagtcatttatgagaactaattaagaaacataattttaaaccatcttaatattgagctcatttcaaataaatgcatgagacttagaaaaaaaaaattaatcataagtcatttcaaccttcgtatttccaaagaaaattaaaactaaataaagtcatttatgagaactgaggaacataatttaaccatttttatgtttagtttgtttcaaataaatgcatcaatcttcgaacaactttttttaatcataagccacttcaaccttcatatttccatagtttgatacttctaataatcacaagctactccaacctccataatatttatgtcaacctagaaacaaatttacacccgaaacacccaaaacactagttccgaaggggtgtaccgtattttacttaaatgttgaactagcagagtcgggtaaaattaaacaaggaaaagcaagttgaggttttgcattcgagacatgtacagaaaaatatagcagcattaagaactaaaaacaagtgatgccttccccatcaattcagataaacaagtaatcataatgaaatcaatatcaaggcaaccgaatttcaaccatttgtaaagaatgtagaaagcatcatcaacaggatttattgcccgctaattgaaaaatctaagtaacgcttgatcatgaacgactcctaaatgttttatatggtttcaactctaggatagaacacagacatgctgcattaactcggtagttctcatctggaaaagatggaaagtcttgaagttgttttctgccaaatctgctcaagtcttctgtggcgatcacaaatcctacttaagaaaaccatcataagattcccaacataagcatccaagggaaaacaatcttcccaagcacatggtattcatttcatctgttctaaaagtagcacaaggaaaacaattttttttttttatgcatgcaagaaggtttttggatgaaattccacaaccagtcaatattcctgtggaagcatccacatcagaaatacaataattccatgtcatagttgccggtctggttgctgagagtcaaccagcacaccagatgattgttttgcagttgacacaggagattgggaaccaatattcatgttacttggtaccatttctttgggctcatacactgctgcagctgtattattacttgtaagctttgcaactagacttgcattattctgatcactcgagggtaaagagttgaattccacttgtttcaaacccttgttctcataattgttgaggttcctggtttggacattgagctgctgataaaagagattgacatgagaattgggtcttggttcattagaaccaaacaaggatgatttttcatctgatgtaagcccactactagaacaagctgaaggctgttttccctcatccattggtccattaacagaatattgttccatggtggattccacattcttacaatttgtttcaacctctattaattcagtagtagactgcaacttagtcgctaaactaggttgtggctgggcatgattattaagcattaatactggggttggaagtggttcatactctccaacccaaccacgaccaaatttacagccagatggcagtgcctgctgaatcttctgggaagcaactttccatgcagtaggtcccagagttgcagcaaaacgagccaaactcctggcatatgaatattcatcttgtggtccaacctggtgccgaaaaatacaacattaatgctttaaacaagaaagctaaactattcaaggattagaaataacaattcactccttttgatacatacactaactagccgtggcttaacttcaccctcaaatgttgtaaatatggaatccgatctagtagctggtagattagacatattatcttgcacagatggtttcctttccaacttggagagcagatccctccctgaaacaataaagtaacagtcaaaagcgaacagctagataatgacagtaatatccaactgagagtatgcaaagttgaacaacgaaggcatgaaatctatgaagcacatatacttcaatttgtttcacgtatccatatccgataccaatactctaaaatacttcatcgatacataccgaagaagtatccaaatctataaagcaccaacaattaatagtttaatttgcttcacatatctaatatcgatactctttctatactttaccgatatacttagtggtgaagtatccaagcttttaaagcattttatgaaagtccaatacaactacaagaaacatgtaagcgtgtataatatagaaacactttcccttaatgaaccaaaaataaaaattgttctctttatgtatgattttaagaaaggaataagattcatagtattgttcctatattcaaaataatagaaagtaatttataatgacatgcaatcatttataattttatttttcattagagacatgtaagggaatttcaattaaattaaatggaatgcaagtttctcatcaattcagaatttgtacaataattatttttactaatgttcaagaagtatgcttataatttagtttgcaaaattataattatatatttatcatgtttatgaattttatatatgtatcttacacgtaatgtattatatatatttttaaaataatcgtatcattgtatccgatacagtattgtttctgtgtatcatagcatgaaatagacatttcttctgtgatacctgatatatagttttctgctttctcttgatttgcatcaatcaataaagcattcccctccagaagggcatcaatattgccaggcctttcacatacaacaccttgcattggaagggaagttggcagtacatcaccaatagtagcacgagttgcacctgaggtaaaatcaaagccaacaggttcctgtgaagcatgacccagcggcctcttttctagcttcttaacaagggaattagatctccttttttgttcagacttcagctcactttgagaacgttcagaatcaatccttaacttttcaaactttttccttgctagttcttgtattgatcgtgcctgtaacaaatatatagggatcatacagcaagcacaacaaaattgctacttgcgttaatttttcaagggaaagcagtcaattttatacctgtttgtggtatatggtctccgccacattgtattgcattgcatttgaggaaatcaaaaatacatcactctgcattcaacagttgcattcaaatcatttatttgcctttcaaaatcactaaatcaggaagacaatatactatgtacggtttaaaaatggttcagatgataataaggggtagcctaatgcacaacgtttgaatggattgcggatattcagcagctgctttaatgcacaaggtttgcggatatacaagtggttcaagatgcaaaggggtctttgacaaagggatccaatggaaccatttctctttcttgtagtggcataagggttgaattgattgatgatggaagctttaaaaatgggtctctaattggtaaagacaaggtggaggtcaacctattgtttttgggagaaacaaaattgaacaatgtaattgacatcaagagcatcttgagatcttgagttagtatcaggcttgaaagtcaatttttccatgagttgctttggagctttaggcttgccaagagttgaagtggagagatttgcggatatcttgaattgtaggttcttgagagttccttgtgtacctcgacatgtcaattggcgctaatccaagaagacaagcgacttggagacctattgtggaaaagtatgagaagaaactagtgggtggagccataagatcctctcaatgacagatagagtgtgcttaattaattttgttttttcatcattaccgctttacttcttttccttatttaagatcccatgtggtgtattgaaaaaaaatatgtccatacaaagaaggttcctttgggatggaggggaaggtgataggaaaatatcttaagtgaaatgggatgagatatgtagagataaaaataaaggaggtttgggggtaaggtaccttggtacttttaatgtagcattactagcaaaatggaggtgcaagttataccaccaaaaaggcatgttgtggagcaatgtgatggagtcaaattacagagcatgaaaatatttactcaatgataattctttaagagaatattcgatttggtggaggaacattaaaaaagggtgtaggggtgggaagaaaggtaattggtttgatagtatagtgagatggagggtgggagataggaaaaatactagattttagagggatacatggttaggtcgtgagtcattagctaataagtatcctaggctcttccatatttctaaccaacaagataggattgttgcaagtgttggaagatgggggtgaggtttgggagtggacgttcgagtggcatagagagtgctttgattaggagaaaccctctctagaacaattatatcaaaacttgaattcgatgtcgatgcaaagagaccaaccagacaggtgggaatggcctattgaggcaaaaggaatatattcaacaaagtctacctacaaatcattgcaggtagacaatggcaatgaccaatcagatgacatatggagatttatatggaacaccaatttaccaccgaaagttgtagtgatgatatggaggccatgttggacagattaccaacaaggcccaacctgttaaaaagagatgtgtggctatatagtaaaggaagaagcatcatgccctatttgcttagagaaattgaagtcaattgaacatttgttatttctcagtccaagggctcagtggtggtgggtacaatgttataagtggaaggatatctcaacagtggagtggttatttctttgaaggaggcaacaacaaaatgagtctttatatggtgtgcattgttgtggtgtacatggagatcccgtaataacatgatcttcaacaatggcatttttaattcaaagaaaatcctataggaggtcatatatgtaagttggacatggttgaaacatccacccactaaactctcatactcattacaacaatgggctagcaatgtgtatgcatgtttgggatgatcatataggaaaggtgtttgagagatttttctcgagcaaggggataagttttacagaaactgaaagttggttatgaaatattgggtaatcattcgtccaaatatgacataaccaactagatagccacttggatgtttcttttctttagattatttacttatggtatatcttatatctctttgatcaatgaaatcgtttatttgttgataaaaaaatgcacaaggttcgaaaatcatactcctcaagggaaaaaaacaagctacatataacttatgctaaatttcatatgattcctataaatagtatactcccgcaaaagttccccactagtttcaatcaaaaacatccaaatcactattgcctacacaattccattatcaacataagtgaataaatcttgacaaactctattatactgacaagtaagccatttaaatgtttcccctcacataaatagcatgcaacaacctcttgctcacaacccacataatcatattgcaaaaataaccaaaatctcagaaaagaaaaggaacatccccaacttcaacagtaacaactgacacatttacacacctcaaattgttccaaggtagaataagatccatttgccaacttcttcctcactgtggcaaagtccatcggatgctcaatcactttgtgataatcaggaagctgcattcaaacataatttgaactttcatcttagattgccttccaaaagcaagattaacaattaacaggaagaaaagccctcatacctctttcggatccactggctccgcatacacaccatatgtatctttcctgtcaattcaccaaaagacatggcatcgccatgcaacaataaaagttgaagattgaagatgttatacaaatcattcaccacaattaaaaccaacaggaatgcatgaagaaagaaaatgggaaacaaaatcgccttacttttgaagcttgtcaaggataaactccaaggtcctcttgtcaggcaacgaaatccaaggtggaagctttgatggagttcctaacactagaaacaaaaacaaaataaagaacctagttaagaaactcaagagaacaatgcaataaaagaaacaatggcacacctgtttcagtatccaacatggtacatttttttaaaaaaagtaagaaattatgtaattaagaattacgaattacattacaaccaaaacaacaaaacacacacacaaacctggaatagagtaaagccctttagaatccacttttatgccctttacctatcacaagaaacccatacacacaaaataaataacataacccaaaaccaaaaaaaaaaggcaaatattgtgtttatgtaataaaaatatgcaatggagacagagacagagacaaacaacaatgggtcctaggttatctaatttatagtcatagagagagatgggggttaataaaatggaagcaaacacaaccagagagtctggatgtatgtgttagttttttatagttgacccgttagttacttatttcccccaaattcctgacacaaagagagagatagtaaacataattcaattatggaccaattggtaccaaaaaaatgaggtagacattgtctcaaattttcaacactttgtttcgttacctcacgctcttcttcatactcattcgcttcctcattccctttttcttcttcttcttcttcccccttttcatatgatgcgtgcaccccacgctcccctttgcgactcggctcatagtcatcctcatcattgtcttcttcattgttgttgagcttcacaatgagctttaacttcttcttgtgcctcttctcgtcctcttcctggtcctcgtcctcctcgttgaggtagtcaatgttgtagcacacattccgacggcgacgaagactccgtcggaggtctggttgcgaggtggccaaagatttgtcggaacggcaagccagatctgccttggagggacgccccctcttcttcttcgttacgatctgatccatcatttgttgttgttgttgcattcttactctcactctctttatatctctccctaaaaccctatttgagtttctctctcttggtttgctttgggaggctccattattttcaatggtgcatgtgaggtcctaacctagctgtcaccactcggacctcagctttggattagggtgggtgaggtaagctgcatgactttgagtgtctagttcccactatttccttcatttctttctctttcttcctttattactacaattaataataaataaactagtaaatacaattaatttcaataaattttttcttattttgtgtgtgtgaaatggcgttactggctaggaatgacgacatcttttgctactcatggcctgaaccctcctttgcatacctttttgcctgctgcccatatctttgtcatttcctccttattttcaccaactatcacctcttgcatcatgtaaatcccacctcaacttaaaaattaattaattaattaattaacatgacaaattggattaatgactactgcattggcttttctcgagaagctcagtgaggtccgagcctgactgtcaccactcgaacctcagcttcagattacgatgggtgaggtaagttgcgtgactttagtgtctagttttccctatttctttcatttctttctctttcttcctttattactataattaataatgaataaactagtaaagacaattaatatcaataaatgttttcttattttgtgtgtgaaatggcgttactggctaggaatgacgacatcttttgctactcatggcttgaaccctcctttgcatacctctttgcctgttgcccatatctctttgtcattttctccttattttttcaccaactatcacctcttgaggcatgtaaatcccacctcaacttaaaattaattaacatgacaaattggattaatgactattgcattggcttttttcgagaagctcagtgaggctcgagcctgattgttaccactcggacctcagcttcggattacgatgagtgaggtaagttgcgtgactttgagtgtctaatttttcctatttctttcatttctttctctttcttcctttattactataattaataatgaataaactagtaaatacaattaataccaataaacgttttcttattttgtgtgtgtgaaaccgcgtgacaggctgggaatgacggcatctgctgcccgtgcccgaaaccgtccctcgcatgcctctatgcctgttgttcgcatctttttgtcatttcccccttattttcaccaactatcacctcttacagcaagtaaatctcacctcaacttaaaagttaattaattaattaatatgacaaattggattaatgactactgtactagagtgagggaataaaatactcctatagtaatgcagattttttagttattacaatggagaattttaaaggaaagtttatgatgattttcttaatctattttgtgatgattattaggttcatgaaattggagtgagttagtactcctttgtccaacttttgcatctattaattgactttacttaatttttgtctctctttccaggatttaaataggaatacataatcttgatgaatatcttattcccttcaattcattgaataatacttttttaagtctttttaataaattccgtagggtaacgctttgatatgtgttttaaaatttaaaggtttaaatcattttttagtaatgttaatttagcattttttttttgttgccgttaaaaaaatgatttcgatccttataaattatgatttttttttcatttttaagtggtttagataatattttttactgttcaaagagttatataaattactttaaagatacaaaataaaataagcataatttgtaagaattaaaattttaaaaaatacaaggcaaaaaattaaagaaatacattaaattgcaataacaaaagatatttaatccaaatttaaattatgcatgtatatttgcaagctttaaaaaggggttgcatacaagttattgattctcctttttaactcgacatgcatgttcttttgattacaggcttttgttttttcttttttattattttttttgtctcaaagctttcagactttttatttctcatgtaaatcacataaatattaaaataagtgactataaggaattttacctacaacacacaatacaaaaatcaaccacgaaaacaagttcataataataactcaatatttttgtgaaactttttattttgttttattctgatatacctgtatttttttataaacattatcaattattcattaagttagttagtaacaaaaataatttattgtctatttatatattgataggcaaactcttgtttttcacttaaaaaaaaaaacttttgtttgacaagtctcatagtgttggtctccgaatattaattatatttctttgttccacaactaatgcaatcaaactacttgtgaattttattaagagcaaattattgaactttccttgaattttactcaaatttcacatgcattttctctctcattttacattactttggcctcctctaacactattaattaatgtcatttttttttcaaacccataaaagtccatctcctctacttccaacacaaacccaatcctcatcccaatcctcatccgctgggagctgctgttgcagcgttggtgagagggagctgtcggtgcaacccatcgatcaagcttccttcttcttatggaacaaccaaacacctctatattaatcacaaactctccctctccctcaacaaccttcataatcacttaattccccacaaatgcattattaatcaggaaattgggattgggataaaatcatcaagagcaattcaagaattaagaaatatttttgtgtatcatttttttaaaatatcagaatatttaatacaactacataattctattttttgcacaaatataagtacatatttaaaacttaaatttaagacaactaaaatgtacttggttttgagtgtttattttttattttcattttcaaattttcaagatttaaaaaacatatatcaagaaaaaactattttaagatatcattaaattttcacttctttaaaaaaatgtagaaaatattgatttgttgttttcagttttaggtcagtttttgaaaatattttttaaattttaagtaaacatattttcactcttatattttgatttctttaaaaaaaaaaaaaaaaacacttaaacaagtgccttgtaattgagttaaaataatctcacttttggttttcatgcttgatgatgtactcccgtaagggtacttgtccaaatctttgtgacctctttctaatttttatttcagattcggattgcctacagtcaagaatttgacatattcaatcaatcacaatcgtgaatggttaaacaagttatattttatatcaaacttaaaatttaaactgtccaatctctgtctaactacatggattcattgtatgaatgtatgacatccttttatttcatagattattcctttctcatttcgaaacttcagccgagtttgtaatctatgtcctcatatatatatttgtctcaaatctcaatcatgattcaagaagcaggcacagaattaaagaacgccaaaatgtcaatataatagtagtacgtatatttgtacgagtatgtacaatgtaatagttaaccgtgagtcgtgtgattgaccgtaagtatatgtctctactcgttagttttttggcgggttactacttaagccttactagaacctgttaagtaggaaaaattgtagtgtattcttcttgaaagcctagatgatgaacgtacaaagctacatgaacttcgaaaaatagttgtgtgcatgtagtgtgacatggttaacatttaaatatgtgattagggtttaattttagactggtgcttacaagaaaaacatgtgttagaagatgtcaagtccataagtagatttataataccttgagagattacttttttaataactggcggcaaaaaaaaaaaaaatcggattaaagaaaaaaagttgttcctatttagataaacgggcttttaagtggtatatataaagtttatttttttttttttgtaaaccaaagaaatgattatataaataaaggggtctaagaaaaaaaaatgttaagtttcaaagtgtggggaaatgatgtatgttgtgtgtgacgttgaaaacttgaaagagtctgaaaacaaaacgtaacttgagcggagccaccgtaaatgcgtacgtcgggacggtcatggtctcttgtgtggttgtggaacattatgatgggttgccctatcgattcttttcacgaactcaatgcactgtttgtttgtgtttccttaaatattttcaattgaataatttttttaaaagttgcacataattaaatatttttaagaaaataagcaatagtttctatttggaccaaaaaaaaaaaagctttaaaaagtgtgtctatgtgtgaatattgtacccttcttgctaaatgctagtccttttgcgtccaataaatattaattatttctctgtcaaattgttagtgaagctcctaaaatgtaatattttatttgaacggatttacaacatgtgaagacgaataaatcacatatcacttactatattttttccccttgaatgtcagagaatggtgttttttttctctccttaaattgtaaagggatcatggaatggaggtctgtggaatatatacacagagtgagagggtttaatttatatattgttatttttacactggcatctattgaatattgattttattgttacatcataagacttatgacgtaggaaaatgattaaaccatattagttagaaatagatgtttacataaattaaattatctctcacatgcacgcacatatacacacatttcaagatagatcaaattattttaagaataatttttaataaagttacttatttcaatatatttttctgtatctattaaattttattaatccaaccaaagattctgatattgtcgaagttctggcttaaaaagatttgggttcagaaaactgtcttcagtgtcttttatcaaatgccacacaaagatgaattggaatgaaaggaactttattaagctcctcgtttccttagaatttctactatagtaacaaaatcatgatatgaacatagagaagtggaaagaatatatggggcggcaaaagtgcaatgaattcgaatcacaagtctattttagctcatcaaaatttatatatatgcatgaatgccggattgaatttggggagtgatttatagtgggatgaagcatatatgttgcaagctgacttccattgggtcaaggtggtattgtgtgatcatgaaaaattgaaattcttatgtaatatatattcagcagtgctttcaaagccaaaatattggggggaccactgtggaccttaaacgtgtactactgtacactttatgaacatgagggtttgacctagctttaaaagctttaagttcaaagcattaattatttatataaaagtgtgtatatatatatatatatatatatatatatagaaccttttactttgagctgaatgaggcttttacttgtcggatgttgcgtattttgatgtggctacctctgctagctttatatacaacccatctactttattaaatcattaagaacagttgagcaacatatactatatagtaattattttcgaagttcatcagagcatctttagtggtacatcttaagtaaagattttgaactcaagatctgatcttcacaagatctcccaataaaggaaatggagagatctccaacatggagaatgagttcttgtacaagatccctcaagatctgcacattgttcaaaaaagaataaattttctctctctttctctctccctaagatctcaaaatgagatctaccattaaaggaaaaaattagagaaattttgagaaatctataatcctatgtggtactatagggtccactaaaaagtggtctaaaatcctaatttaagatctaccactaaaaatgttctcagttggttcttttttggtcattcaattagatatagggtgccacgtgatgcatgtatgatgtatcgatctgtgccttcgaaggttcattaatcagcaacatcgatcagattaattataaattaaactaactaaatttaattaagagttagagttgtgcctagctagttgggtaattatcaaaaacaggcctacttaactttgtcacagtttagttgttgagggaattaacactaaaaaccaaggcaacaagtttaagaattttacttttgatgttgacaatgtttgtcccattaacatatgacacatcatattgacaataaaataagtggatggagtatctggaaaatactctttgctccactatctctcactagcattcaatcaaatttatcttttcacacgtaacgtgtacctttcatccagctttgtggtatctttaaatatcaatcatctaacagttgtctacctccaaagacaccctaaaccaaaaacaatttggagcacacacaaacaaacccaccaagatgggtaaaagagctttccttattgtccatgccttcttcgtcttattcagctttggttcctcaaaggctgaaatcgtttctgccgtttatgtgtttggagactcacttgttgacgtgggcaacaacaattacttgactctttccattgctaaggcaaatcatcgtcactatggtgttgattttcctacacacaaaccaactgggagatttagcaacggcaagaatgctgcagattttgttggtaagtgaatccaaattcactttagctattaatatgccacttcaaacagttgtatagaatatagagacattttttaatagaatgattgtgtgggttgcagctgagaaattgggtttgccaacttcaccaccttacctgtcccttataacatcaaaggccaacaaaaacaatgcatccttcatggatggtgttagctttgcctctgcaggtgctggaatatttgatggtacagacgaacgttatgtaagtgaccaaatgtagttccctctttccctttaattttttattacctccaggctttttttaaatttatttatttatttattctgtttatgcaatatatgggccaaattaaatagggatataggaatctgacccaagatgagcctggatgttttggatcacctctcaaccaatgttattagattcgaactaattattaactcattcaagatatttagttactaagttagatattgatctaatgagttatctgtttacttgcatgatccgatttatattttaaaaaaattaaaataatttcataacatgtaagcttgtacatttaagatttaaaatttaataaaattcattatatttaaaaatatagttatgaatttatttaaaattttgagcatgtaacatatttttttcataattcaatatatataaacaaccttaaattagaatttaatacacacaaattagtcaaggaaaatttaaaaatggtaataattttatcactcaaattttaacatgcggttatgcttggtaaaaaaatataagcaaatttataaataatacaaatgtaaggtataaattaaattttctaatataagtgatgttgttcgattgggaaaaaaaaaactaaaatatgcatgacacgtcaagttcgagtcactgattcgagaacaagtcatgccgagtcagattgaaacacaccaggtcacatgcataactaatccaacccaacgggtggtacataatttttaggaaagtcgattgctaggaatcataattcttagaaatgtgtaaaatacgtttagttagttttaatatgtttcctgaaaattaaagattcatgtaaaataagtaattaaaacttttcctctaatcaagaaattagttgtattcctacccctcattgggaatgttttttgcgaaaaaatgagttaaaattgattttcagaaatcataatttcttgacaaacttttttattaattacattccaaacataaaaatcataatttgtcactttaagattccttcaaaaataaatatttttcatctaccaaaagccccttaggcacattattaaaaatgaatgatcatatatattcactttcttctttatatcattttaatcctattttctttattcattaattatttattgtaattattattttctctatctaccctttctatttttttttctttttcttttttggctctaataaaccccaaattaaggtatacctttattattactcatcatattatatatatatatatatatatatatatatataaaggaggaattcacttactttaaaactaactcttttagagttattctttattttcattattcataatcttaattattagattttaagaaaatcaacagaaaagtaattctactcttaaattaagtgaattccctctatatatataatgttccataaaaatcgttactctcccaactgagccaccccttattctatatattgttggcataatagtgtacttaataacaatatatattattatatatcatttaagagacaatcaataccgttgaggaaacaagtggactactactcaattgtgcatgaggaaatgactcgagaagtaggaggagcagctggtctacagaagcatctctcaaaatcaatcttcgttgtggtgattggcagcaatgatatatttggatactttgaatcatcggatcttcgtaagaaaagcaccccgcaacagtatgtggattccatggctttctcactaaaagtgcaactacaggtaacacataacatcacatgaacatgattataatcaagttactatgctacaaatcttcattaatcactgatcaatagatagacttgctttacttttacctacccatcacatcaaacttcaaaaaaattgtaccgttgacttaataattatattgcgggccggggttccaatacatgcaccctatttgcatgcatgttactttctcgtaaatgttctattgtgcttagagggtcaactcgtgtgtcatttactttgtcttcttttttttcggtaactttttttattttttattttttattttttttgcagcgattatacgatcatggtgctcgcaaatttgagattgcgggagttgggacacttggatgctgccctgatttcaggctgaagaacaaaacggaatgctttatagaagccaatgacatggcggtaaaatataatgaaggccttcagtccatgttgaaggaatggcaatcggagaatggaagcataatctactcctattttgacacttttgctgccatcaacgaccttattcagactccagcttcctacggtactatttttatacaataacatatccaaatattattttctttcttttcgtttctttattaagaaacttccttctcttttatttttttatccttttaattcaaacaacttaaaaatttattcactttttttctcttttatttctttcttccatatttctttcctctaccaaaccatgtttattagttttgttttgagtaaatgaccaatatttattctctaaatttgcatttcgttatagttttaatcctaaaagtaaagaaaaactcaaataagttcgtgagtgtttttaatgtttcacttgggtctctaaaaaaaaaattctcatttttgtttctaaaattatgttgttattagtaatatcacttaagttacccatactagagaccaaaatgaaaagaaaaaaaaataggtttatttcaaagacttatttaagtttttcttaatttcaagactaaaatgatagtaagatagaaattcaggaaataaattggctatttactcttttgtttttataaagttggattctaattaaaataagtttaaatcactttcaggatttagtgaggtaaaaggtgcttgttgtggactgggagagctgaatgccagagctccctgcctgccattgtcaaacctttgtcctaacagacaagatcacatcttctttgaccaattccatcctacggaggcagctgctcgtttatttgttaataaactttttgatggcccttcaacttacacatctcccattaatatgagacagctagtagctgcctaactgaagttgacgattgattttatcccttcaatgacattttttttatctaactcaatatcaaatgccaagtgtgtggtgttgggacgaaaaaaatactactacatttgttaccccgtagagtaatctatttaggcttcatgaaaagtgatcactggctagccaagtgtattattttacttgaagtagatgatatactaagattggcaatttggcataacatgagatgaaggtgtatccatgacaagatgcattcgtgtaagaaagttgttgttttttattactcgtttaattgcaccgatgaaatgatcaacaacactatcatttatgttatctgaccaagtacctatagtgataactgataacttatgttgataaggtgacaagatccaactgattcaaggtcaagagttgatgtgaatccaagctgtgacaaaccgaaagaaggaaaggaaagagaaacggtggtaaaacatattaataatcaaaattattagaattttctaaaaaatattatgagcaagggcaacaattaattgtggatttttagctgagaaaaacgagttaatgtttaaatcattttaaagttgcttgataatatatttatttttttgctggataaaaggggctaaagcccaagaaagcagaaactaaggaacagacagaccagctgcatcaacacgcagcaaagaggaaataaacgcaggagcaacattaaaagcagaaaacaaagctgaagagagaaaactctcttagccatctcatcagcaacccggttgtgttctctaaacacgcttctgaaacagcaacccacgggaattctggacatcctctgaatggtttgcactctctcgagaagaggatgaccaagggtctgtttggatacaagttagaagtgtttttaagattttctctaatggaaatatagtgtttttttcagtagaaaaactctcaaaattacttctaaccttgtatccaaacaggctctaataagagataaagtagagcagagacgaacaggttcagccgcatctgattccactaagacgtgcgagtaacctctatccaaagctagctgaaggccattgaggatagcccaaagtttggcttctaggacataacaagttccaatgtttgccataaaaccatgcaaaaagacaccataatgatcacgcagaactcctccgcaaacagcctcgttatcagacattctaacagcagcatcaacattaactttgatccaacctaacccaggtggtatccaccctaaagtagatgtcgcaacggttgggtcagtatgcaaagagaaatcttcgaggaaactaatagtaactaggatgcttgataatttagcaatataaagaaccacttacaagaaacttattttaaatttatttgaacttattatgatatgttcataagttctttttatttttttatttcaataaattcttcaaaataatatgaaatgaacttcaacttaattttctcttcaatataaaaacaacttatacataataaatattattctataagtctctaattaaactatttaccaaaatggaccctaagtttgtaaaagacttaaaataaaacatggattcaactcgtcttgacataaatgtcatgatcacatatggcatctcaataattcctacgaaaacaaccagcagaagacttcagttcagtcacgatgcattaagaactagagaaaatacatcctcaaagaaaagttttaagtcgcctttgtcaatatcatattccaacaatttctccatggcatcctgcattccattcagaaatataatttaacatgtctctgagagagtaaacaatatccaaagctgtaatttggttcttgaaaattgatatgacaccttgtattgacgatcttaagcagagatgttctcattgcataaccgctcaacatgtttattatttgaaacggtatccaacacagctgttgctctttttatgatttcctctggtacacctgcatgaaccgtacagcttgttctaataaaataaataagagcagaacataaaatatgctttatacatttttgttatcagctaaaaggaaagaaagaacaatatgcgtagtgtactcttttgatcaggaaatatcatttttaaacagcagttttgtaaattaccagcaagcagtgcacagtgcagccctgcaggattccaaaaaccacacacatcattttcaaaggaagatcaaaacatttatggtaaaaactagcatctgcagtacacacacattccatgtatttatgatttagacacttaataaacattggattaacagaccttctgtaagagtgcctttaccaaattcatccaccagacacagagaacgtgaagtagcatgcctgcaggtttcctcaacattaaaagaaaaaattaacacacccaacccacacacacacacatatacagttatacacacactcttcttttaataaactacaaatctcctggaaccctacatctatttaattgttcagataaaaccattcagaaaaacatctgcaattataaaacaagtgggtttaattaattatttgatctttatacatgcatcaacttttcattttagtctctacctaaaaattgtccgtataaaaaattctctgttttagtccctattcgaacaagttttttatgttttaattcatgttgttcgttttctggtagtgtaaaaccgtcacaaaatggaggcataagactaaaacttaaaaaaattccttgtatagggactaaatgtaaagtttttaggtatagggacttaaacgaaaggttggcatggatatagagaccaaatgattaattaaaccaaataagtgagtaatatggaagacaggagcatcctgcatgatagtccaaatactgggagattatacagattttgcctatgatcgatatatagtcaatgtattgaagatatccttattcgcctttatcttggtatacctgagcatcatccctatttgatgtagatcaatcataaatgttgattgttcagctgtcataagccggcttcctgttgcagaaaatattcccccctccccaccaaaggaaaaaaaaattacaattgtaaaactaagatcagcatacaacaatgtaactcccatttcacaaaggacacgattcataagaaaatgatacctatctgtcagacccacagttgctgcatcagctggcacaaaactgccaatgtgggagagaaaaacaattatagcaacctgcaaaatacttctcattacattatgatcatagagcaacaaggagcaaggttgtagcatcatgtaatagccacacattagactgtatgttaaggaatcaacaatctgatgaactttaatgtggaagttaataatttttagtcttcaagacagtccctcacaaaaatcctttgcgctggaaaggtggataaacaagagctcatcacataaaacaataaaaatgttaagatttttaatttatttatagtctgtcattttaccgtcaggtaatcatacaaaaacaagataatataagaaatattaaaaattgtttactttaatattgagtacaataaatttatattattattaaattgtgatgccaattgtcatgtagtaaatttgatatattcttgtatttatcaaataatataataatgttattaaataataataatataaagtaatttttatcccaaaaatacatggtaattaaattctttttcaattggataacagaaaaaattgttacgagtgaatatcaaaaaataaaaacatgcaaaacccaaatcaagacagaccagataaatattatcaattgtagtttgtaggttgtcagaccagatgaatattaacaaccagaagttgataacttggtacacgtactgctaaagaatagttctgcaacacttttttcatttagagactagaatttagaaacattctttttggagactagaaggtaatgtcatagaatgaccttttcaacataattgctatttaaaacagtatgatcaaaatcatacagaatacatataccagaaagataaagaactaataactgacctgctttagatagatactttttccagaaaaattaggaccagtgatgatattaattcttcctaatgtaaagaacaacggaacagggattaataacaatataatgtcatcaaaatggatttcaatgatataagttagcaattatcagttatgtatgtctacatctatttaccatcatgaagaatcttagtgtcattaggaataaatgtgtctacagtcatttcctgcaaaacatgcctccaaacaaaaccagtttttatcattaaccatatcaatgattctccatttccaagaggttcttataaacttgatggtttgaaccttccattttttatatcaagcaaattttcttcagtcaacgaaggcctgacataagtgttctgccgtgcaaccaatgccattgacaaaaagctgaaataaaattatcaatgataaaaaaatgtctgagcaagcaccagttattataatgacaaaatttatcttaccaatccagttcagctgcaaaagttgccacctttatcaaatgggtttggaacaaaaatatacgtgaaaacaagtctctggtgatcgccctctccatatcttgaataaaagaattcgcaaataagtaagatttgcaccagagaccaagtgttataatttgaatttaggaagaaaataactacctacatcacatagctcttctaacacataagctgtgtcaaggaatttcatatttttttattaaactctaatttcttacaactctacacgtaatattgcatctttatagagtgtgcctgtttctccattatcccgctttccaatgtacctcaacatgactaaaccaaagtcatggattggcattcaactggattttaagtggagtttttccatttcaaggttagagcatgttacaagtctgggcaaaggctcagctacttacttcaaagtaaataaataaataacaatagggaactatcaaatgtatgcttaaaatacctagaattttatggtggatatctcccagcagactgtccaattctcgtgtctttggcgttctataaaagtattttttttgtctctccatctgtatcacaaaactgtaattgaaatgactaccatcagaatataacattaattatgtaaatcacttgaccaagtgcaaacggcaacatactgtgtattcccaatctacaagttgctccagagtggtttcatcgggtttttctccaaagatacacattaaatatcctacagtagaaagatatgcattgtgcaataataaaatatccagtattgtttaacatccgaaaaacaaattgcaatgaaaaaataaatatgaataagtgttgttaaacagccacaatggcagcagggcagtgccaccctgccaaggcgtggcagaaatccagcaaatcactgtgtgggacacttggagttgaggattccttgtggtggcaaatggtggctgcaggatcatgacaacatcaacgtggtggtccagggcgttttgtaaaggacacttttgttgtctccgagaaatcagaaaagggatatctaaaaagcccagcatcttccggcggtttcctctggcaatttacggttccttcttcagcaacttgctggcgactggactttcacctcaggctctgcatgttcatctctctgattttcccagtctcaggttttgcctttgtcactgttctctattccctgtttttgtttactatgttccctgcgttccctcactgttttcactgtccttgtctattatgttccctgcctttgtcactgttcattctctgtttttgttatacatatggcttcattgatttttgtctttctggttttttatgatgacaagatttcaacttacaatctcatccaaattatacaaaccttccataactgtatgttagtgttgtttttgacaattttttttttaaaaataatctttttacaagtcacttcaataatgactgatgtgaggataactagagacgttaatggggcaaggcgggtgactactcccccgctgctcatccccgtcctccaattaatttgagactttgtttgagagatggattttaaaagggaagagaaaaaaataaaagatttaactgatgacatttttttctttgagagttttaatttttgaggaaaaagatttgaagatttttaaaactcctctgaaaacttccaaagcttaaaaattgttgttctcccaatttgaaatttttagaaggaaaaataataaaattattattatcattcagtcattttaaaattaagttttatttgtaaaatatagagtgtattaatttttaaagtaagagtaaaattgtaaaaatatcttattaactctgaatttccctctcttaatatatttttaactcccaaataaggagaaaaaaatttctctcattttcctccttttccttcctctcacttccccttaaatctctttctttctcttcccctcctaactctcaaacaaagcctaagtctccgtccccgatcctcgtcatgggcaatctttttccactgtcactatgttcgttcaccctggtcctcgtagtctgctccaaaattttaaaaaaaatattaattttaaattttgatacaagtaaattttaaaaaaaaaacttcaaatgtctcaccaacaatttaaaacattaattttaaattctaatataagtaaaatataaaatcaacctttaatattttaatatttagaatataaaataaaaattaatataagaataattatgtaatttttttggaatagggatcctgcatgacggggttggttggataattaatataaacaacaataattatttttaaacataattgatttattagcttagttggttggaatatcgtattaataacatggaggttgtaagttcaagagttgcatgtgttattatttaaaaatatatattttaactttttttaaaagaaaaacttacttacgaatcgatgaatccgtaagaaccttaacacaaggatacttttggcatttaaaatttttgaatgatgtattagattttgggttggtgtataaagactatcccttatatatatgatacattattaaaagtgataatatatggattattttcaaaatttatatttgacccaaaattttatattaaattttactcataataaattgatcttataataaaaatatttaaacattaaacatataaattcaaaatcaattttattgcccaaatacagacaatctaatccattctactcaaccgtgaatgcttgttttgttttttctttatcatgtatggtagcacaagtttggactgcaggaaaggacagaccggcatgcatttcgagaaaacgaatttaggatgggtttagtagaaaggaaagaagaagaaaaagtaataaaggtctaaaattcatactaatttactaatttattttttttcattttctctactaaatccacccttaaaagaccgggcagagtgatttaatgcagttggcaattgccacggactcgtagtatataacggaacggaccaatattattacttcgatccccgttttggtttgggttatttgagtgcagaggagagtgaatttgtgatgttccgctactacttatactagttgatatcaattatgaaaccgtgttggtcttcttccagttccagtccatctagtcttggcatggcatgagtctcagcgtttcaatcctgacctcatcttcgcgtgttgtggcttaacgtgcgcaggaaatggaggaggagcagcacacttttgtgtccaaagcgagaaccgcctttcattccgccgcggccaaagcggagcgcgttctcttggatttcaaatccgatcgaggttctcctcgcgccacatcaatcactatctctctatttttggttttcctttttctccttatattccgaacggatgtgcattttttttgtttttttttcttctccctttctcttttagggagattcaaacaaaaaataaatttataaaataaaataaaaataattattattattattattgttttcggaattagcattgactcaatttgttgaccgtgaagaagatcacgataagcagtcgtcgcccaacaccttcactggccaacaaccagaagctgaatctcctcacaccgacgaaaacgactccaaggtaatggcaattattgatttggaagaggacacattgaatttaactatttcaatcctaccgaggttcgatttgtttttgttttgttttgttgcatttttgtttttgtttttattcccaacgtatatgcacttccgggagctgtatttgattatcaaacaaaagtatatttgtttcgtgagtttctaatttgacgttaataagggaagggaaatttagatcagggtgttgaaattcattgtttggtttcttattggattcgttccctcaatgacttcctcaaaaaaaaaaaaaatcacaattaattgtgaaaatatttgcaggagtcctgcaaagtgaatagttataatttcgaaatgagtcttggcttaaagatgatcgaaaactgtttatatgtttttgtttgcgtttatgtctaggtatttattacgtgacatttgtcctgtaattacttacacaattggtctttgtaatgggatggtgcagcttcatagtgaatcgaagcatataaagtggaggcctccacatttaggaataaagcaggattggcaagataaaataaagaacatccggagagggagaaaagaagttgaagatacagataaagttgggaatgcaagcatggccattccattttatgatgataatttgtacctcctgaatgtaaagaatgatctcgaggccaaggtaagaaaatctgaaacattttaactcaaggattcatcttccaactgtgtgcgtatgattgaagtctctaaaccaggaagttaagtgaggaggatgttagcaaaagctgataatgtatgctgactatgagcattttgttttcaaaatagtctgtcagattgtgtcatcatcctttgtctagtaagttagcaatgcttggtatgcttgtgataaattggtaatgcatgcttattaggtatctcatggtgtccctctttccagtaaaatctttgaagatacaattgagatttcttattgatttgcctatcaattatataaatgagtatcttattgatttgccaattcaattacacatatgggttgctttaatgatgtatgagtaaaaactttgattcaggcttcagaagcaattccctcagttgaaggcctaactgctgcaactaaagaccccattcctccatcatctgtgctaaagcaattggctatagctgttgagtaagttgtaattgttttgcatatatttttgcattctgttgtcccgttttcctgccgctttttgtgaactactgaaaggttctactcaatgatgttgcattctatttctctggttgcaaagttccccttctctatttggcacagcacatatttgtcaaatgcaagtttttatagttcaacaacataagagtcttgttctatcattcagaaagattgctgctcaacaatatatctagcctcttccttaaattttttttacctcttgactagggctggaagtaaagcaaagtcaatgaaagattttatagcttcatcaggaggatcttcacctgctagagagagggcaggcttaagtctcttggcagttaaggctttagtgctacgtgaaaaggaggacaaacttacatctgagtttactagcaataagaaagttgtgcaattaattaattctctgtttgatccaggtatgtgaattgtaggtggcttgctgataatgtaattatgttaaagaacgttttaatgcttgtcctcattttccttaacccattatctgttatgatctttcactttcgttgtaatatttgcaagatattcgcagaaggagatttccttagaagaaagatcgactcgaatctagaggaaagtgctatgacatctttgccaagagatattcatggtgcgcctcccgaaagccttgttgttaagctagctgaaatccttggaaactacaagactcttcgaaaaatggctcttttctggtgtggggttgttgctgaagtatgtttaacttcaaaagaacttatagttctgatatcataatcatacatcttattacttacccagaactctagatttaatttacattattgatcaatttttccattatatataaactattatctgaagtaactgtcagtttaagtgattatgatcttagtaatagagtgcatcatcatcattgatatcttcatcttagatcacgtgatttggccaaataaatatgcaagataacttgatgatgccatgttgataaatgtcaaattttgtttcctacttgttttgatttttaatagttattttaaaggtttgagaacctcattttgtttgagcagttgggtagtgaattttttttccttgttttatgctgcttcttttttcttttctttttttaaattctggtctattaaagtttgcatccaattttatccttcccttcccctttgcaaaataaaatttgtggaaaaggaagcaaattattcatatgctgtgttattggaaactttgaaggctttcaaaccaaaacaacagaatccctcgtgcactgtaaagttgtttgcctttcttttcctcctcaaatctgtttgtctataaaagaaaaaaaaaaatcatatacaaacttcttctggtttaggatctgtaacttgaacttaactagaatcactaatcctacttttccttaattaccagctgaagaagaatattttaaacttgattagttattttactgatacagctaaggaaactttggtttgaggaacaatacttaccaggagtcccccagaatgagattcctgatctgaagtcatgtcttctatatcaacaatttcaagtaattaattgctgcatctctcggaaaaggttccgtattattgccactgaatctttagactctatgatgatgcaagctaattcagacataaaagaatcgactgattgtagtgccagagctcctgcaagccctgttctatatgctagattgaatagtggggagcttgttcttcgaattggtgcagatcatcctgctggagatatgacattgttggaaactggcgagcctgtgtattctccaatcactcaggtttgataaatatattttttttctatataatcactatttaaaattactcttatacttgagaactttgggaccatttcatgtaggaaggacctttgcttacagaagatctaatcagggaaacagaggagtttgtgctgcggacagggaggtctgtatgctaactgagattcatccatgatgcaatctgttatcttaaatctaaatggactttctgttttccctatatatagcgtgtgaatcccaattgactctttcatataatgaacttctttattaaaataatcaaggtcatcttgcttcttgggctcttcattgcttgttagatgtgttcctgtatgccttttttaattgtttcgcatgatctaaacctatgattatgacctattgactcacatctagactatgaactcccacgaccagggtctgagtctggattctgaacctatgacctatgtctttggtctttttttttttttttactaatttctagaatttgcattgatgaactagttgatcaacaaacattcacagaatgctattttgtaatacatttatgatcatatctgtttcttatgtaaataatttgtaaatgctagctttctttaattacagatgtgcatcaattatgtaatagcttaaagttatcatcatttaggcattttcttattacaaagttacctttcatggtcagtgttggtgctgggtgctctcaactgctctcagatatgcaggctttcaaggtaaggagctcccttgaagggaacttttcttactgatattgtgaatgcttcttactatgttgaatgtgcctaatgttctgtctgagttagttttgtttgttatcatattttaggctgcaaatcctggatgtattttggaggattttgtaagatggcactctcctcctgattggacagataatgaagcaagtacagaggatagtgatgtttttgatagtggtgaggcattgtctgccagaggtcagctaagtcggcgaatgcaaaaagaaggtgtactttcagtcttttccatcatagattgatgtacttaaattctcctgcaaggctattttgtggtatttttctacgtaaatggaccatcaacatctgataaaattgtggatttactttgcttgaaacaattattcactgtaacttgtcatcgattgtagtaaacttttgctctatgcttataaattttaccatcatttatgtgttctttatggctttgatttccaaagaggttgtgatttggtaagttgtgaggaagatatgcatggaactactgaactacactatgtatgatgggaattgtttattgcagtctaatgtaggaacttttgtggcaaactgatcagttttgggtccagaatgtctaaatgtagagtttgaataattttgaatgttgaattaataatttcattgtcagtcaattgatatcagcatagatattcagatttcatattcctaattgccttgggcaaaccatggaattgaaagtgttgaaaccctattcctcaatctttgtagcatctatgtaagatatattacctaaattggatatcatatcacatctatggtaaagcatatggagataagtaaatcttgagtactgtcttactttattataagttataataagttataacacacaaaatctgcaagaaatacgggaactgtcgagcatttactttcttctgctttcatattattaaacatatctgatttgtaggtaatttatggcgtgaattgtgggaaacatccaaaccagtacctgctgttaagcaggcacctcagtttgatgaggatttggcagtgtaagttggtgatgaagattttttgcattaatttatatatttcaaccctaaagccatcccttgaatcccttgttgcattcatttatagggagggcatcctcaatgcatttgaagacatccatccatatgatctttttggacagctgtttgtttctttagtaagttctttattttatcttttatcacattgattaattttgttgtgtatagacagttgtcatttgtcattacataatggatctctgaagcattaatattataactcataagtgatgtatattaattaattttttatttgaaaattgtattttcttattttttggagtttggtggctgaatctaaagcagattgtagaatatatagtaatagacttgaatcatgaagatgaaggtaccaatcaagaactaaactattttcctgtaatgcatatcataggagaaaaatgtattgacatctaggctctaggcattttttgcgagtttagaattattagattggcatgccggttgggcatgtccacacatcccttaacaaaacctgcctagagctctagtataaggcaacttgttatctatgctggtggttgaaagaattttatacgaacatataaggcaattggtcgcctccacatgtccattcccaaaatctccctagagctctaatatacaatgcagcaacatgttacgtatgctggatttcaaaggactctaggtagcatagggttattctttaacacatgcacacttgcagtttcacatgctggatttcaggactgtaggcagcaacatgttatgtgtgtgtatggtagagaagggcatttgtagacaataaccttatggattatggatcatgaagggcatttttatctgttaagggcattcccattaatccataatcagtatacagttaaaaatgaaatgagcattgatagtagaccaggaagagtttaaaactgcataatatgctttttatgaaatttccaatagcattaagtgcataatttatccaaaatatctgcccttaactgataaaaatgcccttcattatccataatctgtatcaatgttaattatttaaaaaatatttataacacttgtaaagcatttgttagtctaaaagtaattcaatttgtgtgttttgagctggctccaaccaccaataaagcatttgttagtataaattcttcaacttttgtgttttaacctggctcaaactggagtattcaaatcttcaatgtaatgtctggttatgggtgtcctagatcaaaaattttggtcttgagaaagggaagtaaaaaaatggaaactgtgcaaacatacttatcatctgcctgtataaaggagatgaaatgtattacttttaatatttttctgttgaagaaggggggataaggcttttgttgttgtaaggatgggggatgttcttcctgttacataggactaatagtaatatcctgtgtcattcaagaaaattgatagccttcactggaggatgtgtactgtcaactaaatacttttttaaacatctttgtccttttttcctaataaaaaatgtaaaacaagcatttagtaaaactcctttccatacagacttcagtggcattgctgttaatttttgtgaagattaaagcatttgctcttaccaatttttattgaaaagaaatataattattcttaactttatattatttcagaatttttaaattacataaagtattttgttccaaaatgttgcttaattgataaatgatcctattatataatcctgtaattttgtaaagtttcttgataaaaactcaacctgttccttcatcttcgtataagttgactcgatttgattgatatgtattgatgcttataccatttctatacctttctaatcataacctttggttttaattatatagcttggtttaggatttgcaattgccgaacctatgctgtctagtaacagtgacttctcgaagttattctatgactgcaaggagtacataactaatgcttgtcaaaacaacaaattgaatgagaaagttgatggtctcgtccaggtgggtactcctagactaagtgacttatgaagttatatagcatctccctgaatccttgtgaagcctctctattgattaataccatgaaatacatggtcaatatgacatgtaatccagtggagaaatttattgctttatcctcgtatttgaacagtcattcactgtataaataaactcacaaagcagagtcctgaagaaaaaggaacattccaagactatcacaatgcgtgaaatttgtaacttttacctagcctaccttccagaactattcagtttgctgttttcttttttaaaaaaataaaaaaaacatacaagctcgttgtgcaagataaccctacttcttaagcatggggatgaaaaatcattcccctggaaatgtaaattgataataaaactcttggttgttgatttatatctgcaactaattgttaataacatcattcaatagagaatttaatgttcgtattcctgtgtaggtatatgaaacagtggagaaaatgttattgaatcccgaagaagctctaaaaatgattaagcagacagaggaagcaactacggttactggtgaaccaaggagcccatttaggaggcttagccttatctttggaggcaaagataaactattgaggaagtctgtctcaaaagatcagacaaacgacgaagaaaagtcaggtcggcaatcattctctagtttctttgacagcaagtcatctttgtttggaaagaagcctcccaagtctggatccccatctccttctgagaaatcttctatcgatgctggttgggcagttgtttagacaaatttcatcttccactgtgtttattgaggataagcaatgtttttgggttcctcctccccctgcagataactgtaaattttctctattcttttgccaaatacttagtggttgtattctgtagaaattttaattaatacttcattcttttttatttgagggaattgaaaatatagctttcgggcctttagtaaacattttatgtgttcactctgtgccaatacttgctatctgctcgggtgttggagatcctttgagatactcctcaagcttgcaactctgtaggaattcggtcatggttgacattaagttctcggtaaaaaataataattataataattaaaaaaaaaagacattaaaaaatatatcctaatagatatataatagtaatgcttgtaattataaaaaaaattatagtaatgcttgcttttgggtagtttagtctctatctaacagaatttgatctattaatataaaagtataacacagtgaatttatgtttgagaaattgtatttggacatgaatattgttggaaaaagttaggaagggaagagagataataggggggggggggggggggatattgtcataacaaatgtttcatgaatcatacaactctttacgttaatggtatgatcatgatgcacttgcaagtatttctatactaacattaacataaacataatcattgatggcaaatttctttagtacaaataacttgtattcttaaatatcaaacaataatcatattaatcctatgttaaataaagactgtactcttaagaggtttactaacatttttttgggggtagtagtaaccccagtaaatcaagggcaggaacaatttggtttcatgagattgtaatcgctaccaagtctagaatacctaatattaatgagcaaaagaaatctcacttggatgtttttattataatctaaatgcgaactaaagatacaaaagacacgtacagtagtgcttcaaccatcatgagctcagttctcacatttacgtaatcctgtttcttccttcgtgacctcccttgactatctattcatcttctattgcatttacatcgtcaaccttctgctcttcgtttgatggcttatcatatccgaaagagttggtaaggaaacctggcacgacaaaatttgctatgaagtatgccgatagaagcacagcactgcaatatataaagaaatctttagttaacttctagacttaaaagatcacactaactccattttggagtaaaaggttgttataagcctaagcctagtgtcaaattcaattataataatcatgaactatcaaataaataggaggaatgctcgcaatacatttttttttagtataccctcttttctaactcccaaatttattgaataatttttttagacatggtaatattagtaagtaacttttctccaagcaatgaaaaagggaaagaaagagattgaaccttattggaagcaaggtggacaagtcaccggattgggctggggcaacaaccagtaaatgtggaagtgccttggtacttagtggacttgctgaaggtaagtgctggccacgtggaggttggtgagtagtaagccaaaatagtttggtagtgtggctcatatgatgtaactgcggtttgagttttgcatgcaaaggaaaaggaagcagtgaaggttggaggtggaggcacctcatattgttcatgtgtgtcactgtgttgtgcttgggatattgggatatgcttatgtttgggagtgagtggatggatattttagtaaacatgccatcctttatgtagggtcccatttttgttcatatgttctagacaggtttatataagatctagtttatcattatttcgagcctattaaaaaatgaacgaataagcgtatagttatactgttatagtggcacgtagccaaaaaatcctaaatcattaagctggatgattatctaagatggatgattatttttgtatttttatttatttatgacttaagtttgaataaaccaatattatgttttttttttttaatattatgtgcatatttatgtttgaattatttaataatgaattttaatataattatagtaaatattttaattaaatttttattgattttattattattaaccttatatattatatataagtaaagtgtatatcacaaatgtaaatatgagtatataagtatcatgcaggtataaaaatgatgattaaaattgttacctggagcaatatgagaccggatatagatattatatctaaataagattatgtgtatagttttatgggaacctatctaaatcatagtaattgtcatcctagtttggtgtagttttgaaaatatttacatagcatgttgttttgtcacataggacgtcacattcttttacacaagttatatttataactgattttttacattgattatatatattttttgcattagttttaaatataactgattacatcaattatagatataatcatgaaaaagtatgacaaccaaacaggaggtgtcactcgctgtatctcctcttgctacaagataaaaaaaacaagtataaagtactactactcagaatacttccacaccctacgtaacaacaacaaaaacaactggtgctacgtaaattattttcaaacttgtattatgaattgtacaatcaacaatccacttatgctaaataattaccatataacacagttttttacgaccgagtccaaattgcactcaaacttaaaatctctcttttcttcctttctctcatttttgaatccgcgcaattccaattcacctcttcactccttcatcttttcgttctcgttctctgttcttccttttcagtttctagggcttattattattcgtttcgctttccgccaagtttctcgcgccctaacagtttttccccgaaacctcgcaccgacgcccgagaaactcgccaatcgatggccgcagaggaggtggctcctctcggcggcagcggcgattcctcgtcggcagcggcgagggctccgtcttcgttcgtgaagaaaggcgaccggaaaatgttcacggtggagctccgcccgggagagaccaccatagtgtcgtggaagaagctcatgaaggacgccagcaaggtcaacaatggatccgcttccgcaccggagcatcgcgctcccaatgcgaaccctgcgctcgtgtccagaatcgctccggtgagcctctttttaggttccaaattgttgtttcgagtaatagtgtgtttctgaaatttctgtttacgtacattgtgattcggtaagtaggttgcaatgtgtgagagggttactgtggtgtatggatgatattttgaattgtaatttgcaaaggtggtttttgactgagccgtgactgtgttttctttttttttttttccggactgaaataagggttaggaatgaggatagtgttattttttagaattacgttctgctaaaatgttaatgattgacctggcatgttgttaactgggaagtgcccgggtgtttcttgtcggtttttgacaacggtttgtgctccgtggcagtgatcttacgtgaaattatttgaaaaggttttgtcgtggcaaagttgaattgtttgtggaattacttgtatttgacttgaaatttattaggtttatttaggttgaatgcgttatgcttattgacttaatttggattcgtgttatgccacgatgtttcttgttggttttcaacaatggtttgtgctgcgtggcgctgctcttatggataatcatttaatagggttttgtcgtgccaaagtcgaaatgctcgcggaagtacttgtatttgacttcatatttattaggttgaatgcgttatgcctattgatataatgtctgtctgtttgtatttgtgttttggccagtgttatcaatggcagatggcagaagtctgaaattccgccataaacataccattgtgccttatggcgggcctttcttcacaaattgcctatggtggttggtaaaaaatctaccttgccattctgccttggctgctagttaacaacactggttttggcatggcataattgtgtcagcgctaaaacaacactggttttggcatggcataatcgagccttgaattgactatatctggttttatgctacagtataattatttgtcatctggataccagcaggaattagcatattgtctttcgaaatagtatgtgactatgtgattttgttttcactattttaataacacttgtcacttttagggacaacctaaggagattgaagaacaggatgcacctcagacaaaccgtttcagtgctgtaatagagaagattgaacgcctttacatggtatgggtgtgttgcttcctgagattgttactcaatggtctgtacaaaaatgaattggtttctactataaattcatatcatagatgcatatgtaagtattttattaaatttttcgagctattttccatgttgggaataatgggactctgaatcatttttagggtaaggacagcagtgatgaggaggatgcacctgatgttcctgatgatcagtatgatacagaagactctttcattgatgatgctgaattggttggtatctttttataccatattaatttgtcatgactcatgacattatgaccatttgacctttgattaatgatgacaggaattgtattgtcctatattgttgccgtttcaccttgcatattttttatgtagttctactgttctttctgcagaatgagtattttgaggttgataattctgcaatcaaacatgatggattctttgtaaatagggggaaattggaacgcatgtaagtgttttttgtttgaatattttcggagtatggcaatttcttatctttgtgagggctagcctttgttcaacactaaggctgctgccttttggcctggaggtcaccagtttgaatcctggaaatagcctcttcacttgtggggccaagtctgtgtgcatcttccttcctcaaatctcatttggtgggagtaggggtgttcaaaaactggtcagggaaaaaaaccaaaccaaaccgattccgaatttgaaaccaaattggtttaaatggtttcaattttgaaaccaaatttgagaagtgatttttaaaacgagttcagaaccaaattggttttaaaaaactggttcagaaccgaactagtttcaaaaactagttccaggactgaattggttttgaaccaattgtaaactggctttaaaaccagcttggttcgaaccaaacttatttgaaaaaaaaaacaattgagttttatttaaccaaactggtttggttaaaaaaccagtgcagttcggaaacagtttggttcgaaccagtttatatgcccacccctaggtgggagcctcatgcactaggttgtgctctttatgtctatctcttttctttgtaaaccacttaattttggaagcctttgcactttcctctttttcagttgatggatataatactacattttcagtggaatatatatgcttgtgttgttatatgaacatgtaatgagatcatgtatcattcactgtcatagtttgagtagtgacaaagactaatattagtgttcctgtaacttgttaattttatgcttgaaatgttggtcttgtttcatttctgattgttggtctattgcactattgttctaaactatgaatttacttttctgtacctatcactttgtttgacttaaacttttcatcagttatagcttaaggcctttattagtatttgatgttgtgaagttctttcttcctgttcctgataacattttttcttggtttatgattgaatattctttcatgtgacacctgtttacacatgttgtgccaacattttgaatctattaaattgtagtttggagtagataattttttcacacaaattcctgattttattgattttctgtttcttctttctatattaccagaaatgaacctccagtattgcctatccagcaagcaaagaaaagacgccgaaaagatataccgaagaatcctggagaaaatattgatagtcatgtatcaaataaacatgtaaaagttggcaagactgctgctggaaagactgcaccattacctgtgaaaaatacaattagttcctcccataatttgggtgtacccggtgaacattatgaagacatgaaatttcggagtgagttagatgtgtctggaattagtttgaacaggaaaactgctgacactagaccaacatcagatcctcctgtttgttcgaaagtatcaaatgatgatgctcctgctgctgcagaaggtgctgaaaaacagaagaccaaagtacttcaatctaagaacacatgtgataaatataaagatggaagtggcttgcttgatacttctcatcagaagtaccatgaaaaaagtggatctgcacattccaaatcccatcctggaaaaacctcaaatagtgttgacaatctagaaaagactggtcggtcgaaagataaaaatggcatcaatgaactgccagatcttaacttgtccgtgggaaaatctgctatacaaacaccagtaagtttacgtagctgcttttctgttgtctttattttatttctatgttctatacggtccctttttagtacttaccctctttgtttcccccctccttctttcacccttcttttattttatcttatttttcttttcgtttgtcttatttcccctttatcttctcctcccccttccttttttttttttttaacttcctcgtatctatcattgggttcatctaccaccgaccccaattaacttgggttaaaggtgctgttgatgttgaagaaggctcgctgctgcacttatatcaattcattcttgctattcagctttaaagtaaaggattctccattctaaaccatagctaccatatgaagcatggaactgcccaccaaataagcacttctagtagatcaacttccattgtgattaacaggttacattgaagcatgacatgcagtgtgccaggaaaagtgtgtgataagaaccttgggaaaatcatattacaaaaactagccgttgtagttagagagctcaaagtcttataaacacaaaaccagaatcccatacttccaacatgagactcaagtctcataccttgcaattggatcctatcatctcaccatgcttggcaaccccgatgcccattcaggttggctatgcactagttctttgactagtcccaagcaaatactgcaatgttgtcatcaccatccacatcgctcgtttgcaattaagagagacgttgaaaagctttaatgcgaattgataagaatcctaagagaaatacaccaccaaagctaactattgtagtgggagagccaagatttcttactttgtttttgggtgggagtgggtgttgtatctgcaccctaaattgggctactctccaacccaagcagtcttacaattgaggaggttttcttttgcccattatttttatttttactataaattattctataataaaaactaaagtacaccaaggtttcttactttgtttttgggtgggagtgggtgttgtatttgcaccctaaaccgggctactctccaacccaagcagtcctacaattgtggaggttttcttttgccttttatttttatttttataattaatcatatattatactataaattattctataataaaaactaaaaaactaacataccccagtgcccaaaggctccttgctatgtgaaggtaggggagagggtcattatacgcaatcttattcttgtatatggaaagaggttgttttcgaattcgaatccatgaccaactggtcaccaatgcacaactttaccattgtgctagggctcaccttgataaagtattctataatatttaaaaactatagaaaaattaatgcataatatatcatataatagagacaaatgtataatgcatattatatattactaccttcatccctaaatataagacttttttaactaattcacatctttgaagaaaatttgttaatttggttagcaacattaaatttgtttagcaatttgtattattttttcaaaattacccttaaaattatgttaactcatcatctctctttccacttaattactttttacctaattaattaatgtgtcctagtcttctccaatccttgtaagagaaagaataaatttatcttattaatttattgcatttattgtaaagcaattaagggtattgtggtataaaaaatgtaaaagacaacttgaaaaatgtctcatttaggggcagaggtagtgtatatattatagattattataataataataatataaatatatataaataaaatatatgtaaataaaaatgtaataattaaatattataatataatagaaagaataaaaaatattttatatatacatatattaaaaatagcagtcatcccactattgtttttgggagtgatcccgtgactccatccactatggactattattgtgggattaagtctcataccttgtgatcggatcttaacagtgtagcatattgcttcaatttactccatttacttgttaccttggctgttgcgggtcatcctttttcattcaaaataatttctatttaagggatattggtatacatggttggtttttctttaagattttggcaaactatactatccatttagcgtgcacttggtgagataacatgttcttattactatgacttctgacaacaaaagttgtgaaagtggactgttatgtgtttaacatatactgtgttgatcaagatcttgtttgaagcttatgcagaaatctgaaaatgtgctcaagaaagatggttctattgctaggcctaaaacgacaacacttgagaaagctattcgagagttggagaagatagttgcagaatgtaagtttggaaaatgttttgaagctcacattataggcaatgtgggaagtttgttgctaatgctaagtttttattttaaatattattacagcaaggccaccaactatggaaaaccaggaggctgattccacacctcagggtgtcaaacggagattgcctagagaaataaagctgaaacttgctaaagttgctagattagcggtattggcaaattttgttttcttgttatgctaaatgcttctagatatatgcacaattttgtattatttttttctcaaaattcttctcagtttgaacattgtattatcatattgtaatattgactatatgtttttgtcgcagcaggcaagccaagggaaagtatcaaaggagttacttaaccgtcttatgagtattcttgggcatctgattcagctcagaacactaaaggtatttaagcttgataaacataacagataatcctttagtatgtatttttcagtttccggttataatccccaatgcttagcaggagctatatagcactaggctgcctttttgttgttgaacccaaaagttatacaaaatttaaaaattgaaactaattattgcatctctcaaatcacctatctttctgtccagtccactatcctgaacttttgtacaatttgtagtttgtttagtgattaggttatgatttaacaataccatattctaggctttgaatacattcgtgacctaatcacattgtggtttgactgagtgacttacttttgtgaccttcttaaagattgattctcttttcttccttttttttttcctttaccctttttatggtgatttcaatgtcatatgtctgagggctcaagctagggtggacaatcctcataggtctcccacggtggtagatgattttttcaccattagatttattacttctaaaataaagcattcaattttttcttcttttttcccaatctgtccctgcccccttctctctcactccatcttgttgcttcaccgctgctgcgatgacacaagccactgtcgacatctctaccataaaccgccctaggatggcagaatgtctactgcaaccaccataaactaccgttacaaaccacgaccgaaaacaattacctaaaaccaaaacaaatcacaacccaccataaacaataaagaaaaccagtgtcaatggccttcgccaagtccaccagcactgactcaggcttccccacgcacactaccagattgaagctgtgtgcctagagtctctggcgcaggtcagagacggactcaaccagggctgtgtggcagcgttggaggcagactcagcgtagttagcgtggttgaagcagtagacggggaggaaggtagggcttgttgttggtagtaatgaggcagttgttgcgaaaccagacgaggacagcgcaacagcattggaggcttcgcattgcggtggtggtgggagcctagggagagatggtcatggagaggagagcgataacagggcagaggggatcttgggttggatgaagggggaactgatgggaaaagtgaggctactgcaaatggagattttgcagtggaaaatggcgagggtgtcaagggcaaaccaggaaagataattatcaattataaaaaagaaaaagaaaaatgtagacctttgatttaaaagataataaatccaacggtgaaaaaatcatctcccaccgtgggagacctatgagggttgcccaccctagcctaagccatgtctgagtctatgaaattcttatttttaagtgattgtttgcccacttccattttaataaaaactggttttccttcaggaatgaaggacctgtttgctttagactttggtgactccacagtgacagatggccttcctgaattgattctaagtgcaagatcagtatagattattttgggagaaatactagcttatttcctaaaaactctctcatgaagcaggcaaaaataagtaatgatccttcaaataaattgaaccaaacatgcactaattgtaattgatcaagtttctcaagttcacatttttatatagaaatagatttaggaaaagtaaagctttgttgccttggtgagtagaacttgcgtatgttctatacccacgctctttgtttataatcatggattagggtagaaagaatcaatcatggatacgaaaaatcaatctaaatccctaatttgtggtaatggatagactctttacataataaatgtttttcttctaacactaacagtagaagctggtgatttcccaaacaaaaacaactctattcctatcactacaaaattaattttatgtcaagtggactctaattatatttcagaagttattcttcagtataaaaatcaaacaaactcaaccatgaactccgttcttttacaatccaattcaaaaaaaggtaatttcccacctattatttattgtttatgctgtcaatgaatttttgcaactatttttctctttgtttataatttatatttatatttatcgttacataggtaattttaattaccatttatgcttgaattgaaacttatcttctcattcaatgtcttcctgctacagagtaacttaaaaaatatgatcagtatgggtttgtctgcgaagcaggagaaagatgttaggtttcaacagataaagaaagaatttattgagatgattaagatgcaggccccaactatggaatccaaggtttattatagttacattttctatttcattccatatcaaaatgaaatattcagtactttttgcttgttttagctggttcatgtagcttctttttgattccccctactatagttataattcatagtatacttattttcactctttcttatcgatgcttctttatatcgattcaatgcaattttgagttttatatgcaaatccttattttggcatgtttacttatggataacttttacctggaaagggatttccttagttgtagttacgaaactcaatctagttttgttgatatatttcctgatgcttgcgttgtatcttgattgtaattttacaggaaataactgtaatttcgattgattaatgaagattttggttatttaatatgggatgctttttcatgttttcctgcatttcagctacagcagcaagctggagcatctggggaacaagaattacgtcctgatgggaaaccaataactaaaaggaattttagtgtggacactgcattggaagacaagatttgtgatctctatgacctttttgttgatgtacagaagtttgaaccttaagtatttattttatagatcctgtgcggtttgaagtttgttcttaatgaatcttatttgcaattgttccaggggttagatgaaaatgctggtccgcaaatcagaaagttgtatgctgaggtggttcaaattttctatgccttcctctcgatatttgtttttaaatttcagactttcagtaccttcttcctttgggtttgattttattttcttttctatatctcctagtttaagttaaaattactaaattagtactatctaaaatctcttctatcatttcttttcaataccatagttatcaatagtgctcaattgcggtgcaattgcagaggtgcagagcagaatgtcattcggatgtgacaaaactgccataggtggggtgtttttgcttcactgctgttgtagcctcttttgctgagaagccggtgaaaatccttttctgcctttaaagtaaaaagcatttttgagggttctttaagtgtaaaattgacttccctccattttcagaaaacgtatataaccctaaccctcaattttcctacgtttcctcttcttttctgtggttgataacccctttcttctctctactgtctttgttctgctgcacaaccaaacctgtggagcctcccatctatggcgatttttacagcaacacccatctctgttctcatctctattctctgacttaatagatatttttcttccttcatttttgcttttatttaattgtatgtttttctgaagacctatgattttttattgatagttgggaataagccaagaaatattaattaaatatttgtttagcatatgtaattatgtacataatgatggatcatatatctgtataataatctttaaaatagcaatcatgctattcactatccagctataacttgagatttggctgctaagcattgctatctaggattgataactattttgttgaatacattgaaaagaaaaggattctcaattattttttcacacatgtaaatttttttattgcaattttttccttcttttgagtcctcatgaatgattctcttatttcagaagcttgtgttactttttgcgtgtgactatgtgtattgcatatacattgcagtttctggtgtctaaattaatatgtttgctttttctaaacatattttttctcactttcaagtgcattgtcctcttcagcttgcggaattatggccaaatggttacatggacaaccatgggatcaagcgtgcaatttgcaggtcaaaagagaggcgcagagcactgtacagcagacataaggtatgcctttgcaataaataatagcatataacgatggtgtagtaatattctaaaatctctattaaaacaaagaagcctttacagtttacatgttctcagttttgaaaatttaagaggagtttcacgatagtaatttgtggtctagcctgcaaatacctatgtggcatgactaagttggaaactaaacaggagtcttttaatttttctcttcatccttaccttaattatggctttaaatagataactatgaattatgaatcagaagaattggagaatttgctttctgttttttgtatgtacagatgacaatcaggattttatatttgtgagaaggcttaaatatgtttttgattttatatatccctatttcaatttactacctaaatatatatttttatttattttactatctgacattttcaaacttttgcttttggtacctgtcgttagtctcggtcccttgagtgatgatatggcaaattaacagagtatcacatcattgattaagtggtgatatgataggctaacaaagtgtcacgttatcacctaatggacttagattaaaggtaggtaccaaaagtaaaattttgaaactatcaggtagtaaaataataataaaaatatttaggtagtaaactgaaaaagaagtatattacaggtatgaaaaacatatttaagtcttatgagaataatgatttttgttttctatctcactggttacttattgttaggatcaggagaaaatgaagaggaaaaacttattggcacctcgaccaaaggagaatgttcaatttgatcctagtccaattacttcccaacagcccatgcgagcaagattagctgcagactctagttgtcatactcatgcttcagtaaacaatacagtttctaatgcagtcaccgctgcaccggttcacaatccttcggtgaatggtcctaaacaagaaaaagcaaagggaagttcaagtggttctttggatcacgtcaagggtgcagacggtgttttaataaagaaggtaaagagaaagccggaacagggtttggaaggaactcattttcgccctgagaagatggcagcttctctgcaaggagaagaaaagcgaagatccctaaagcagtctgcaggtgttccccccaaatcaaaccttcagccaacttctttacctggactggagcagtcaagctaacatgaaatcaactaggatgtttactcaacagaatgtattttacagttttttacccctttttttttttggctcaattctcctctcccaaatcaattcatatactacttattattacgatttttgtatataggtagatttgttggttgttaagtcatcgcatatttcttgagaaatgaagtcataggcacgtaggttcagggtccaagagactatacccaaagcacttatctcacgaacaaacatgtccccccaaagtcaatgagtatttctttctttctactattttcggtcaaaagaggctatcgctccttggctcactgttgatttgcataattggtcatcgcgtttggttgaaaagctagtggtgcgaagttatcgtgcattggattatgacagaacatctctaagtcagaatccgggctagaagtgacgcgtgagctcgttgtccgtttgccgaccagtagtagggggcctggaccccccaaaggcacgtattgttggtgagcttcgtgggatggattagtcctacgagatgtcttgaagctcaattctcatcgagcggcaaaaatttctttcttgactatattctaatgaaattctataattactttattttttattataaatagaaacttgttccaaatattaacaatattattggcatatcgagtctggccttaccatacttctcgtagatagtggtgcttctgcagcaagcttgaaattttgatgaagcaaacacaattaatcttaaattattagtgtttcataaaaaaatgtcatcaaattagtgatccaaatatctaaaatatcaccatggtcattatagaggattaaagaagtgaaaaaggaaatctaaagtttaatttagtaacagattaaatctttaaaagaaattttaaaatattaacatttttgtttttatggatgattgaagtggtgataatataatttggaagggactaatttaatgactaatgactaattaaatatttggggattaatttagttacaattttttttgggtaactaaatttgtagaaaaaggtttttggaaaatataattcagttaagatttttgaaagattataattattatagatattataatgatgatgtctatttgtcttcgtattttttagactagtatattctttaaataacattatacactatcattattatattttaaatgcatatgaaagaactaacccattaattacatataaaattcgatgacggtgcatttttatttaatctccatcttttatattttattttattatctaaaaaatatagagatactaagtgcctcttttttactctttaggtgtattggattaagattttcaaagattattctaatataaaaatcttgtaaaatttaaaagattaggtaggaatgtcatcatttaatagattttttaaaagacttgtaataaaaaaattgtagtttgaatttttatttatataataagaatttaaaataattttttatctaaaaaaatgactttatatatttataaaatttaaaaggattacatgagtttttagaaaatatttaaaattagaaaaatcaataaaaaaaatactaagaaatgataaattttgaagaaatgtaaaatccatacttttttcaaataaattaaatttaaattagataaatacattgtaaagtaattatttgaaataataatatattactctgacaatgttatccaactttgaggcactttcatatgctaaattgtgatttaatcttaatttatgccttctctttgtggataaattctttaaaaattgtttttttcatggtaatcatttttcttttttaaaattcattgattctagtttcaagtcttcttatactagtcctttatgtattaacatattttcctacttgctctttggtttgaacaataggttcaaaattatgatcgtcattatttgttaatgttgaacatgaagatttttctattggttcaattggaaactcattagaacaataacattctttgtgaacaaagttacaaatgtatatatattgtcttcaacgaagagagagaatgaagtgtgaagaaagaaagaaaagtctagcaactgataagaaaaataagaaataaagtctacaattttttcaagagttgaatgagattgtttgatgaatgcagtatttatatatctactaaaaaatcatatgaaattcattctaaaaattaatatatcaaaatttgtatatttttgaatatcaaaagacttttttgatttttggtaattttaaaataaaataagtagttttgtgatttttggtgtgtttgtttaaactatttttttaatatgcaagtcgttcccttttaaaaaatcacattttttaaaagcacttcttaatttaaaacaaatgagccttacattaatcttatcaaaattaattgtgattaactttaaggtttaattgtaatttttattctcaacttttatattttggcaaattttgcctctaataatattttggtgcattttactctcaactttttaaatatttcaattttgcttccgttccaagtttcactaacatttttttggccatttttaactatcactgaacacacctatttaaaataagtatctttaacatagtaaattagtaatgactaaaaaacaccattttattattattaagtccaccatatatcaaagaaagacaaaaaatcagagtctaatatatataacttattggtgctaaaagactaccttacaatgatatactaaataaaaaggtcgggcaaaagaagtttcaagtcgaatatcagttgacataagtgataatggtttgcgttattaaccaagtgatctaggtttgaatcttggttggtccttaggtatagaataaatattgttgggaggagaatattcatcttgtgtgcgctcatggttcccgataaaagttagtctttgttttcgatgagaactaattcgtaccaacactatggtcaacaacaaaaaaaagttgaacaacaattactatttattggcacaaatgatacctaccaaatcctaagaacaatagggatggagacaacggtgaggccactatggatatccaaggttactttgtgactctacatagtgccaaaactattacagggaacgatcatggatagatgagaaactggttttgcctggcaacaaattgattttcaggtgatgaaacgaatatctagacttaattttcgatcaaattcttctagcatagctctcacccataattcatttcatctatatttttgtgttctactccttaagcaatgttatagatatataacttcaattttttctaaagtgagttggagcctttattcctccaaaaatttatcaaatgatctcataagatgaatagcttctagcttcttccattttctccaatcgtttgctctctattgagaagttagatgttcaaactgtgacatcctagatgctaacaagggtgaggaatgatcatcgatgcacaagagatgtgtcacaaacaaggagcgactcctagcaagtagggatgttcatcaaccgatccaaaccgatgcaaaccgcggtgaccgaaccgaaaaatcgataaccgaaataaccgaaaatcgaaaaatcgaaaaccgaaaaaaatcgaaaattttcactggattggatcggttttcggtttggttggtgaaaatcgatccaattataaaccttaccttaccctttacctacttgggcttattcctcatcatagcccaaaaaccaaaaatccaatacattgctccttattttgtccaatgaacatgtttgtccaatgaaaattagaaaatggtgtttgtttttgtccaataaatttgtttgtttttgctagatactccttagtttgataaaaataagtctcataagttttattttagactttttaaaaaatcaaaaaccaatccaatccaaaccgaaaaaaattggatcggatttgaaaaaaatttcaaaccgaatggatgatcaaatgacaaaatcgaagggattggatcagatgattttttgcttcaaaaccgatccaatccagacctcgaacacccctactagcaggcttccagcgggagggatatatgaatgaattacccggatgagagatattcggaagttgtgtaggtctgagactgtccaattaaggatgacttaaagaaattaattactattacctatacaaataaaatacatatatttttaatagattataacttaaaaatttcataattaagtgtgtctgatttataataattataaaataaatgataaagacattctttgatgataagtttattgattattagttttttggttttggatatattcgaaacaatccgctaatggatttttcaatccaagaagtcagatgcattagttttatttttaaaattatgattaaaatgaaatttaactttgtataactcatttttttatctacataagtactctgacaaataactagaacattccatgattgattggaaatataaaaaaatacaaagtttaaataaaaaaatgaagaaaggtttgatttatttaattagcaacagattattttatcagtaaaaagatatgaattaaaatacaaagattcagacgttggaaactactaatttcgaaaatatcataaattgatttgattgataaaaatgcattttaacaattaaattagagaaatctaaatattaatcaagaaaatataatataatattatttttttccaaaggtgaggaagaaaaattataatatttaaaatttgaaacacgcgatatttgacctggaaaatagtattttcaagacagtaacgaaaagatagggaaattagacataagaaattcaattatagagagcgaatataatactattgttcttcagaactctgtaggcggcgatctcctttgtctccgttccatcgtcaaccctacccttccatctgcgtttggcgttcaggttcgtctctgtttcccgagaaattagcttttctattttttttcgcagcgcaatttcgcaaatctgcgtctagaacggttgaatcgggaaaatacatcgcaataggtgtattgttgttgttgttaatattcttgtttagaaacgtaatgaatccgagacgttatctatgcaagcattttccgttcagtctgattttttttttttttatggttttgttggttgaatttgttatttgtcaaattaggtttgaagtccgaaggacgaagaagagatttctgactgcgtaatcatgtttggtgtcgtaaggcgaagggttgcttctggcagcccgtttccttgggtgagagctcggtcttttctaaacgcttatgaatcatgatgaattttcaatttaaatgtgtttgtgttaatccacagattgaagtttaagtttaagtcatgtttgatgcctgttctgcatttgtttcagttgcttggtcagtcagttcagaagattcggtctggcccatcagtttctgctagagcttcttccattgcggaaaaagaggtgtttgtctttattttctgcatatactctgttgatatgttttttcttcttataacttataagaaactgatggttatcggttctcaactgttaacactgatggttactcaaatattatgtttaggagatagggtgatgttgttagtatatgcaaataaggtagtgctcacttttagtccttcaaaataaaattgttcgttttgtcgctcatttgtggaaatgtcacatgtggttcctatttccataaacaagggaccgccaaaatgagactattttattttgagtgtgtaagagcgaattatatttatagaaactaaaacatattaaccctttgggatatgtgttaaatgtactacctggacaaatagaatgtgaaaatattgggtcgagtccttggtggcaaattcctaatcttgcttaattgttgtaattgtttttgataaaatttctttcataacctgaaaagactctgatgctcatctggtttgtccttggtggcaagttcctaatctggtgcatttcattttctaactttttcttttttgacgttgaaactatttcctacatctatggcttctggatttttcaacagtttgaaaagtaattggtcatcgtcatttctgtttatgaccttttttctcttgtgtgttgtttgaatcttgttcaaaatgtggtcggattaacatatggttgttcaaattcaatgtgatagagtaagtttactttttttttttttactcaattatatcagcaaagtatggcaattgctaatggatatatagactgcctgctttgtgtacagactacacaatgtaaatttcttgggacaatcttattatctatttttattttttttgcactctcttctctaaaaaatatttcttgtaagtaataattagcacacatgattttttcacttatcgttctgtgatactgtatcctacatacaggtgatgacctcattatttttttcccactgttacttatggtctttgttatagagggttagattttggaatttatatgttatttgtatcctttgaagtttcttacaactattgttttattgtgtttaacagattgcatttccttcaggcggatgtggatttgtccaaaacttcagtcatataacacttggtaattttgggtacattttattttaaatattttagatgctgttgacttaattacttgaatgatttatgcaattttgcaatttaaatcataaattttgttgttgttgcaggaagctggattaattcaaagcctatgaggttcgtggcaccatttaatagtcctaagcattgctttaggattctctttaatttatgtaaaaaagttcggctcagaaataggatagattgtaagggtgctcttggtttagaattttggtgtctttaatcttttccttgaaaataacaaatacaattgaaaacatgttttagttatacaaaagcttaaaattagctggagtctggaaacttaagatcaagctctccaacaaggctttcaaatgttagaattaggtttggaagcttcaacaacaatcttattgtttaaatatagttagaagttagaacaaaaataaagtaatgcagaaatgtttactgacttcaggaggaaaaaatggattggtaataaaaaatatagtaagaaaatgagaatatgaaattgttttcaaatccttagccaatcaaatgattcgaatccttaattttagtcatgacaaatttggttgtactaatatttccttgcctttttcagtattatttagctgcaaattttactctttttcttgtatgttgctaatgctagcttatgcacataaacattcctatcatgtggtcatcttcttagaaaaaaccaagtatttaaatttattggtgttattaagggaattgaatgtcccgagatgcaagtttgaaatgatttttattttccaagaaaaaaagaagtagacactaatgcattttctgtattcttctatagttttatttgtactcgatcaaattctgttgatgatattttcacatggagtttcgggggtgcaataatgacaaatcattaattaataatcggatggaatggaaaatagttacaatttcttatccacagtgatgctgttctgatattgccttattgctttgtagggtggtcattcatccagaggcaaccgttcgaacaagggggcgtctattttcttcagaaagtggtgagctattgatgtgacactattgccttattgccctattgatgcgtctattaatgtaccattcatttttctggcatttacattgtttaattaacctgttttattttggcttttgattgttaatatttttaagattgctaatgtaatttatatttgtgataaaggagatacggttgatgttgtggttcctcctttggctgaatctatctctgatggaactctggcacaatttttgaagagtatgttatcctgtatatttttttcgtcatctatttgaattgttaatttatgaattattggtgactgattgtcgtgttttgatttgttatatgggagcaggacctggtgacagggttaatgctgacgagccaattgctcaaattgaaacagataaggtgctatgtcaaagcaacatgcaaatttttgtgaaggattttgatggttataaacatttaattttcttgatttccaaatagttaatgctgtattttgtttttattccttaattaggtgacaattgatgtttcaagtcctgagtcaggcgtgattctaaaggtacagtttcatagatttaaattgtttttactctcctcaaccaccctgaaatgaagaaattgttactctcttctttcttgtttctcttttattaaatttggcttgtgtgatctatttaatgatttgcagcttctagccaacgaaggtgatactgttgagccaggtaacaagatagcaatcatttcaaggtctgctgatgcaactcacgttgccccatctgagactacatctgagaaagctgctcctcagccaacccaaaaggttagcgaggagaagaaagctcccaaagttgaaactgctcctgctaaagagaagcccaaagcatctcctgccattctgaagtctcccaccgagccccagcttcctcctaaagaaagagaaagacgagtgaggcattttgatttttggtcctacctgaattatatttagcaaccatgaaagttgttttaatgtcttccattgttatcaaaggttcctatgacaaggcttcggaaacgagttgctacacggctgaaagattcccaaaacacgtttgctatgctgacaaccttcaatgaagttgatatgtaagttttgttgattgtcaaattgtagcatatgattttaatattgctcaaactgtttttttaccccatgtgtgtataaaaatgcactattacattatttggtgatggttctaatggaacacagttgtctaaatttaatgaagtcctcaacccatggtctgtcctctacagctatgatacattggagagtcattacatttctgttaatttttcttggtctttgtcagatcaacaaacctgttacgtattctctcaatttctacttgtcttagttggtgtacatttcttatttttttgtttagaagaagatagggaaacgattgacttatatgtattggggttgaagcatttttcccttcttgcatttatgcttagctttttgctcatctatgtaattttacattatgccactgagtagtttctatgcgataacacccagtatcgtgggatattctgttgattaaatgagggggagggggagggggagggggaggaatgtaattcagttattatgtagacttaatcaaaaagagtgattccatgtgtttaattgtcaattcttgatgttgtgtttcctgtcatatccttatatagtggattactattatcattctcttccttattgctctgctcttaatgataggactaatttgatgaagctccgttctgattataaggatgcttttgttgaaaagcatggagtcaaattggggcttatgtctggctttgtcaaagtatgttttctaattactgaagtatagactagctgggttttccctttttgatttcctcatacactttttatggtctccatgttaggctgctgttaatgcactccaacatcagccgattgtcaatgctgtcattgatggtgatgatattatatacagagattatatagatatcagcatagctgttggtactccgaaggtttttatcagccacctttatcttttctcatttactttgtttacgttgagaaatcaatcaatcattatactgtcttgatgaaacttagccatctctgtgatcaacttatgtcaactattgtcatggctatggagctaatttactagtgatctagtatatagtctaattttgcaattttttgcatggccatgaaaattatcaacatgcatgttgtatttgaacaaatattgaccctcaatcgccattccagggccttgttgtaccggttatccgcaatgctgataccatgaactttgctgatatagaaaagcagattaatgcttttgcaaagaaggcaaatgatggaactttatcaattgatgagatggctggaggcactcttacaatatccaatggtggtgtttatggaagccttttgagcacccctattatcaaccctcctcaggtttggaagttatactaagataaatatcattatatttttttctttaatttgtaagacattcttcgatatgttttgaagttgtttctgtatgtatatgattgtacataatcattgattgctttccttctatcttggtaggttcaggcattgtttatcatttaatgaaatggtcattatttttgtcaccagtaactcttcaatatgcaatttgttttcacagaaggatcagtttaattctaaatatcaagccaaatattctgatctattcccttactagttaaatatgtataattgttttttttaatgatgctaattattgtgaacaataaaatatgaaattaattatttagaaagaaaactcatgcagttattgtttttggcagtctgcaatcttgggtatgcattccatagtgagccgtccaactgttgttggaggaaatattgtcccaagaccattgatgtacgtggctctaacatatgaccacagaattattgatggaagagaggcagtgttctttctgcgacgcatcaaagatattgtggaggatcctcgcaggcttctgctcgacatatgaactgaacctctaattttaaatggagtaaattaaacctcaaaattcaaataccataatgggttctcttttgtttaggttttgaattgcggctgcccgtaatttataatctgtaatgagcaaactctttaggatcatatcccaatttcccttcgatattaattcagcatggttgtgttttttctacccactattcctctcatttaatatgaagagggtcacagtttttggctccaaaattgtatgaaacgactatgaactatactgtagggattgcccctggagtaataagacgatttcttttcatggcactttattcttacactattttttagcggatgaaaattttcagatacatatcatcatagggtccaagaaagcggggatgatataatattggcaataatacactgccgtaattaaattccttctagaattcccgggtttttatatacgccacatcgaatgtagcctctataagttaataattctcatgtgaaaaaatgcttttatttatttatttttgttaattaagagcttaatccaaaaaaatatgcatagaattcaacatgcaaattagtttgtttgctgggaacatgaaaaatggttgacgagagatgcatggtgataaatatatgaagagtggtttcattctatcattctaaataataattgtatatcaattattgttagttgtcttctcaacattgccaagcttcaacatacgtcctttgtattgctcaggtactaaaactagtatatattgcatataatatgcttgtgtaaattgcaaaaaaatcagggtaaaaagtcttggatgatcaaggcaaggttttatattctcaagaaaaagtgaaaagagaggtaattgataattgaattgggaaggtagagatcactcaagcttgcaggccatattcagttttattctcatcaaacgtgttgggactgattcctcttgttcaaagttattctgtgcctgctgcggtcttggaacggaaagcatggcataattcttcgcctaacctcacaagtctccaaaagcagcttataaacacatggtactcagtcaaaataaagagtttatttttcatccaggctctcatcttacctccaccacagaaatcaacatttaagaagttctacaaagatgatacaacttttattcatacttttgatgatccaaatagcattcatcttaatattatcttttgcaaatccaatacgaaaattggtgatcatggggctagacctcttgaagcaggggaggggcaccttagtcacaaaaactgtagcagcaactatgtgtgtggtcttgagctccaccgtgtatactataatcaaaatccaaaagcgttccaaggatgctggcatagttaatccaactgatgaggtgttgatggcacatcgtctcttggaagcagctttcttgggtaattactcaaaaaatacattccttgtttgcttacaaagttacaatatctgcaggactattttgttacacacaacagaaagcgaacttacttaccccacgtgtactagtgtaagcatctgtttagtttcataacttctctgaaaggtgacaagaaggttgaaatcatcaaaatttcactatgaagtttacaaataaatgtttctctaggcttgactcgtggcaaacagaattgagaaatgcccaccaataaaattctctattaattatttgaagaggctatatttatagttttgaatatgtgctaactaaaagtagctttagcatattttgacattttttttatcggcaaatgtcagttactaataattaattttttattagttaagagattcaaacctacgatctcttccccttttccttttcctttcaccaccaaaccaaccttataatccggttttgttagcatattttgccattactcatgcttggacaatgcatttaattgagaaatgaattctatcaagtatcaatgaatatagatttctctttagcacttctgatatactattatgtgcagaacatgagttttaaatcctataaaatggtaattattgggcaggattctctctgttccttggattggtgatcgacagacaacattactatattagagagattaatttactgaggaagaacctggaaacagctaaaaaaacgaaatcacaaagactccttaaagagaatagtggaaactgagaagtcccaaggtcaagctcaagtaagcggaaagtaagacacagttagcacataaccaatgtcctgaaaaggaaaaaatctgaaggaggagaactgtcttaaaacatgaagatgttgcatgtcctttgtatgaatgtgcaacgctcagaattgaattgaactgaatatacatacataattgttctaattgtgtctgtagttcatataaatgatttattttatttttatgtaacaattactgaatataaataatttcaaatttgaagatgtgcgagcattcatgaattacaaaaccataactggtagacattggcatatcatgtttgttataaatgacctcagagaggacatcatatgtaagaatttgtcatttttatattacatatttaaatgatcgatataagtactttaaaatgtcttaatctaataatactattgaggcaaatgctaaccagtgctcttagattatgttgtccatgaccttttttacgcactcgtatggtctccacaataaatacttctccttttagttccttcaaccactgtcagccaacaaaaaccaggaagttactcggtataatgttctttctcatataaaattaacatgttttgctactaacaaagaaagtatcaaaccaacatcatatgtaactgcaacatcatataattcataccaacatcagcttgacacaaacagttgcacatgaaaaccctaataaaggcttaaatacttattttagaatgacaaagatacgaacttcaaagcaggggagaggtaaccaagagaccccatccacaatctattacaacaatacttaatccatttcaggttggtaatctattggctgtggtgactttgctggaggcacgggaggaaacaatggtgatggtgatactgatactggtggtgatggtgacaccggcggtgatggcgacactggcgttggcgttggcgttggcactgcttgctcaaaggcacacaatccaaatacacataacctcccaagggggcatgctcttccacacctaccacagttgaaaatgttcacatttgtgtttaagcacaaacggttgcagcattgacgattcaacgtgcacctaaccccacaaagcccacaattttctctgtctgtagtcacatccacacaacggtctccacagcatatagaccttggtggaaactctcctctgctacatatcagtggtcttcccctgcatccaatgatttggttctcatctttctccatcaatgatgttgatgaagatgaggcatcagtgccattctcatggacttcttttggtgttggatttccctctatcttgatcagcaacagcaccaccaccaatgttacaagagctgaagattgtgctcttagactcatcttgaggaagtggcttgaagggtagcattttggaaccatatatatatacatccatacatacatatatgtatatatatacatacatacatacatgtttatgtgaaagtaaattgcttttcttacaagccaaaggggcatgtttttcttgcatgaataacaaccatggtcttgatctcgtgttatgggcggtggacgttgtctatatatgtgttcgagttacatatacactagaaggaatattttgtcagctagctctgtgctttttgcataatgagttgagaggcttaacatttgtatgttgatcctcaaaacaaggttgcgtgatttaggattgtaaaacatgatgatgaatgcaaaaccatgaaatgaactgttacgttattgaagggaactgattcacatgaaaattgaaatgcctttctgaaaagattgtaactacctcatgaatctccgtatgttatttgtgatttattagcattgaaaaacatgtgcattgcacgatttaaaaataaataaaaagcaagaaagaataccaaataagaaagcaaagtgaataaaataaagctatccagacgacatgtgacgacgatcggacagttttaataatactattgacgagtctcaagatttcgagtgcatttggtttaatattagattaaacagacacacattcccatgcacattttgtgaaaagtaaaaattcaaaacttttaattcaacggccgtttgagacattccaacgtgaaaccaaccacgcacttcaagcttatttttataatattattgacgcacctcaggacttcaagcttactcaattctgtttgtagtccattgtaacaccttatgtgctcagctgaatgttgatacttattaattttatcttattttatgattatgaaatcttaagaggaaaaaaaatagttttaaactttaagctttagaaagcttaaaaggaaacaattaaaagaattgcccaaattccctatgacatcagttaaatatgtaaaaaggaaataatataaatagatcatataggatataaggtattctctctaattttaaatacccatttgtatcctttatgtactgacttagaacgctagtctttacaagtacatcaccagaatttgctttgtgcgtgttgaagatattctgtccgaatactcaagatgcaagaaccggtgctgaatactactaaattgacgatgcaatgggtaattaagcctaaattaaaatacttcagtgtttttttgaggaagatacataccaaatcattaattgctacattatacatcattaattactgaaagcgtttgagtggcagatgtccctacatgagatgagtatgtgccctgtcccaaaacgcaaccaacttaacatgaattaaaaattaaaaattaaaaattaaaaattaaaaattaaaaagttctgcactgtctaaggactatgctcaacttgaagcatgtaatgatttcttttttataagcgacaacatacaataactaaatgacagaatctaaaacaacatagcactttgacagcatcatgcaatcaatttgaagaccaactcattaaacaatctattgatagcctctatgatttacaacattaatccatttcttgtactacaacacattcttaatcatattaaactattaacaaccaattctaacaaaatctgaaacaatcaacaattcataatcaattctatcaaaatctaaaaacgatcaagcactaatgcacagccaagaggcattgaaaaaacagcaataaaaataaaataaagattctcgccaaattcttaacccataacataaaacattcactacaaagggaaaccagaaatacagcaagtgaagatttcatccttaagaactactacaaggacaaacagattactgaatttattatttctcacagtcaagtcaagcattatgatacatcatacctctaaacaccaacaacagtactcaggtgagcagttattacatcgtactttcacatgaacgcgtcataaaggcagataaaagcaaatacatacaacacacgaccttaaggctcaagcacagcacactactatgtgacttaaacggtgacacaattcagcaattattcttaaagcactgcggatttgctgaatttgctcataatgttagagccttgttactgtagaaccacacattcacaacccaccaccacagtagggtgttcgcttgtgctgactgcatcagcttctttgacactttgaacattgacatcctccaattcaccacagccaatggcttcaaaaataagatcattgacttcttgaaatctctcttgagagagggacacctctgcaagaagcctccaagcattgccttcagatgcctcatcataatccttcttcctctttagaaccatgtgcccactaatttcccacacagcaggattcacttgggtgtcaagaagctcagcatccacttctccaagagcttgtttctctgcataacactgttcatccatttggtaaatacccccacacaactaatgaaaatagattaggcaaattcacttgcttcaagaattagtttacctgtggtaacagatagacttgctttccacagtcagagataagaacattgaaaggtatgttgttgttctgaagacatatacaggcatctgaaacaacatttgataaatcttccagcgtatcaccaccctcgaagacaagacctctaactggataattcaacagttcagatatcttcaccccaccatttaaacttgcaattttcttagtgggggccttctcaattgggaagggcagagccaaataataagcctgcatatatattcatgccaaaatcaccaaaatgcaatcagatttgtagaattaaacagcggaatcatcaacacgaactattaagtggtatagttgatcagcttccagtacctggaagtgaagatggttaatggttgcaaaagcacccaagctgttgtaacccaatcgaaaatatggattatcagcttccactgccatgtgaagtgcaaggaggaagctctcacggtcaatcctttggggcaaacactcgaaaatgtgcggaatcagcaaaacatgtccatactcgataggactgacctgttaagaaaatcgataaacaaacaaacatcatcatcagttattacataaaacgcctaacaatgaacccacaagaacaaaagctagtgtctatacattgatggcaacaaagctgggagaattgtcaacatcaactggagcatttggaaagaactggacttgtccatcctcgctagcttcaaattggaagaggacctcttcttgcccaactttggtaaagttgaatttgttttcatcaaagggttgaaggaccttgtcaactcggaactcagttggtctcttcttgaggtgacgaccctcattaagctgggcaacgaaaccatattcaccaggaatcacctacaacagaatcaccacaaaacacatcaaactcagaaatcataccatccatatatctatgcataggaagacaaaaacaaaacaaaacagaccttggtttcacaggcggtaacatcatagcggaaaagtcctttctgcatgcgatcttcccactgccatgaaagggtaaaaaaaaaaattagaaactttaacacaaagggtaacaagaaaagatggtgttaacccttctccatgagcaaaattccatatctacctctccaagaagaagtgagtcgaggaatgtgaggggaggctctccggcgcatgcatgcagggccaaatcctttccattagccttcttgaaagcatacaaaggaagctttgcatctgttaacaaagcaaaaaacacaaataactaaaaaaaaaaagagccatgtataatggatccaactcaactttagagagttattgatgacaaaaaaaaccgtgaatgttacatgcacatgcatatatgagttggagaaagaaaaaaagaaagaagtacctggaatgcaacaagctttaaggcaattccgaccacaacctccgacaggacgaggagattctgcagcgtcgtctttttggtagttggaaacgacagtgggaaccctcttgagtctgagcatcattttgtgaacgaaagtagaagaagaagaagaagaaacggcgatcttaactagtcacaaagtctgttgtttttttttttttttttacttatttaagagtatgtaggctaaaagtaataaaaagagtgaagaaactagaagacaccgccaccagcgaggaagagcaagtctgaagggctaccaccttcagaaggcaaagcaccacgcccaccgtgcggcgaagggttggcggaagttacgcaactacccgtcctccgtcgtacagttgggacatgaatgagggagcgagagactcttagaatagccgtgatgtctgcaacgcttcaacccggggattcaacccaacaaaaataatgaataatcttgttttgcttctgtttttggcggaggagtcgttgttgagagaaccaacatgcagaaaagagtaactaactaaactagctctgctttggtggatgtggtgtgagaggatgaggtgcctttgtttcttgttttatagataagagaagagagatgtggtttaaatgtggccgtgaataatgcgtacggagtgaaatgaatgaatggaaagaaaaaaaattgccttggtggaaaaataaacagagtccgatagaagagacaataattgaaagagagaggtggcttcacttttttgttcgcctcgctagacgctagtggaccagtggaccactgtgctgtgctgtgggcgtaaccaatgggcgatagattaggtatttaggtatttaggtatttaggttaggcccgtttcaaggaatcttggactccagaatcttctctcggtatattcattccactcatattttacacttaatcaaatgtataagtatgattaatcttctgttacaaatagttaataataaataaatgtagataagtgatttataatcttatattatataatactttatcttacaagtgattaagaatgttattcgttttagattgctgcacatgattaattacatgttcaaatatggctattttttcttctcatcataagtagttaagagtgaagattattaagttattaaaatatctaatcatgattaagtttctctaacaagtagttaatagaggatgccttgtacgatggactagtaagcaatgtggtttatgctggtggcggacataagaatttcattgaagggacgaacataaaaaaaattatatcataaataaaagtattttaaagataatataaatctaatatacaaaaagaggcaaatcacaattcacaaattacatatagacaaattgcaaataagatggggttgatgaacaagcaaacaaagtctaatgagtcttaataaaaaattcagaatttaaaatcaaactcaaaacaataatatggagataaaagataaagaagacacaattagttttagcgtagaaaacccaattgaataaaaaatacgatgtccaaattggataatcaatccaatggacaactccactatgataataaataagtatctttaaatcctgatagagagttaagaatcagacttgtaaaatgcttctatatgatctcataacaattctctcaatgagataaacataaactctctgaagttctaatattatttagaatggaatgcatactataaacacaaaaatatgtttctatttatactaatttaagtatatgattttaaccaatttttgaatgcaatcctacaaatattctatcatattatgcaatgcaactttaaagatattttatattatgcaatacaatcttaaaaatattttatcctatttttgaatacaatattaaaaaatattttatcttattatgtaatataatcttaaagatttctattatattatgcaatataatctcaaaaatatttttttctattttttaatgtaatattaaaaaatattgtatcatatgatattatacaatacaacctttttttattgtcaaattatttttttaatttttaatatatatatatatataataaaatttatattaataaaattttaggaagacggtgacccaccttagcccctcatccatgctggactagtttttatagtggtatgtaattacaatttaatccttgtgacttaattctatcccttttgcttttttattcatccctcatcattggtctcttctattctcaccatctgcaacctcaaggaaggactcactggtctcaccatcggaatcactatcgttgtcagtctcatcttcctccacgaaaacgacatcaaaacacttttgagagtccagatttgggggaggtggaaagaacgactgaagagggagagagggtaacatgtttgcgaaaatgacctagttttctttactagtttttctcactatttttggatgtcataatgctttgagtgataatgatatcttcatatttgttaaattacggtgttgatgctcgtctctagtttttaatgtcgttatgtcaatggtttgaactctcacttttagatggttatggatctacaagtttctctcagtcctttagatgatggcgaatgcagcaaattgaagagagggaaagaagaagggaaaataaaacaaggtagtgatgacgtcgacaataacgacgcacagcgaacgagagaggaaaaggaccaaggaacaagaaaaaaggatggtgtgataaaagacaatataaaatataaattgataaaaaaatacttcattttaaccgtttaatattttattaataaatattattgaaaaattatttgtcaaccttaaaccacctaactcacttgatcaccttagacattgtggttaatagagccataagttattaaaatgtttgatagtggttgattttttaccttgtatgttaataaaaaaaatttatgcatacaatattggtaccaagtattcataagaatcaaatatgaagtcttatattcaaagggagaaaatttaatactattagaatcaataacttattagtttataaaaaattaatgataattatataacataattatgcataagtaatgatacttaaacacccattaatatctcttattttatttttatctttctctttttattacatcataaaatctataatacctatttttacctttctttcactaattgtcaaattttactcaaattatatatattcatatttatttactttaaactatttataaaacaaaattaatcatatttatgcatataattaaccaagtttttgggttgaacgctagacgtctaaaaaccatatgtacgttcatcattattcatcttttctccaccagtcgtacgttaatcattattcattttttctccaccggtaccccgttaaattttcttccttgatggggtatttttattagaatataatggttgacctgtttgtttaagtttttttaaagtattttttaataaaaaatcacttttttttttaagtttaagcaaactatctatatgtatttttttatgtaattttttgacaccttaataattaataaattaaaagttattgtcatgagttttaacataattcttcaatcggtaaatttattatatattatatttgtgattgaaaggcataaattttttatggtataaatgatatttaatatttttattttacaccgaattaatctttcttccacttccattgtcggcctatataatttgttttctcttttaactaatgaacggttgacattacataaatggtcatacttcattaaaaataaatttatagactacttcttaaattaagttgtcatcatgagtcaagttgaccgatttataaattactataaattaataaatattatatctaaaatacaattattaaaaaattcttctacatttatataagattaaaaatatttttcattagatcctttttcttttcattggatcgtagcttagatttatgccaaagtttgagacgaaaaggaaataatatctttatctgaatacctaaaaaattaatattttaaatttcatgaatgatatcatgtaattattttttatatattctttgtcttttatattaattagattttttatttgtatattttttattttctcactttacaataaatgattaaatatataatgcaaaatttaatattttattaatattgtaaaatcacaatcaaaatggaaaaaattgttaaaatatcaaataaaataggatgaagggagtatagatgtgtcaatcaaccattagtattgatttagatagataggattaagagaaatactaataatacatttttttgaatataatattttttattagttgaaattttaaattttcaaaaaatcctttttaacttatttttattaattaaaatttatttaaattacaaaatcataattatttttcattaaataaagaatatgataaatttcatttaataacaaaaatactgcatttaagagaatatattcgaacaatgttagtagcatttctcttatctagattcataattagccaccgctgaagtaagatttgggatgctaaaaaaactttctttttgtttgaaaaattagaagtactagtaagataacaatccaccgatcgaagtgtttaccaatcccaattatgctgggaaacaattctctttttacgtcaatatttttctatgaaatattgccaagggtttttttaatcaatgtttgcttttttgaaactagtcaaggaaaatttatttaaaaatatattaaaagttatacaaaaatgtatctgtaaatgatagaaaaatgtagttttatgtattataataatcataaaaaatcctcttttactttctcaagtaacttgttagcacatttacctattggctgaagcagtaccacatgaactttcgcaacaagtaacttatttatccccatgagcctgccaatcacgtattcacggcttcacgcatgacgtaactcattctcgcggatttaaaatttatactgaaaaacgtggaaatcttgctttcccgtggacgaaaagactaaaataagtactataactatataatataaatggtaaatagtttttttttttcatgagtatgtagagtatggataaatttatctctaaaaaataaaaataaaattttagtttttgaaagtaaaaaaaatgataaatttattcattcgttaatttttgtccgttaccatgaaagagcctaattgacacatttaagagacgaatttatctgcactttacatattcaggaacgaaaatgattatttatttaaaatataatttaatctttatctttcttttttttcaatcgtcgcaaacataacattacaataaacacttaaaaaataagaaagaaaacatatattagaacaaacataataataaacataatattaattaataaatataatctgtctcagaaatttttattatgacaggtaataacaaaaacaagttaggtctcattatcataatttttttttgaatttcatattttgtgtaaggtactattatattagaaattttataataatagataaactatgcttattaatatgtttgttctaatttatacttgtttttctatttttttaagtatttattgtaatattatgcttgtaacaattaaagagggaaaaataaaaattaaattatattttgggtaagtagtcattttcgtctttgaatgtgtaaagagctaacaaaattcacccattaatttgtctctgaatatgccacatagactctttcattaacgtgttaacagatgaatgaatttgtgacatttttttatttttgataactaaaatttaaatttgaattttcatttttagatatgaatttataacactttatatattaagggacaaaatatctatttaccctaatataaaaatggttaatatgatttaccgtgtacgtgaagttccctcaagctcacaacgatcatgttgactttgttaggtttttccccctctaactttgtttataaattactttcaacgattttttatgcttttatttttatgtttttcgtaaataaacatttcaaactttaatgttatcccaaatatttcacaaacttcagttatcgttcatttgtgtttttcttgaacttttattaattttcctggccatatatccatttgaatatgagaattagcataaattaattctaagattaagaaatgattttttttaaataatcacttaaatcaaattgataaataccaccagtaaatagaaaaagttgttcataatttttacatagttctgtactagagtctccatcaaaacctttttcaaccaatccaaaaacatacgtttaacttgagaaagaagaaaagaatgacgcgttaaaataaatacacgtaaatcttctctcacgcacgaatataaattagttttgtatataaaaattataacattttgtggacttgaagaagtcttgctgtgtatatatacatatcttgtctatattgaattttgatgacgaatttgtggcaacctaaaatgcgtatgggaagaagctctgaaatttctctatctctaccaacaaacagaaaattccagtccatgaaacttcgagggtgaattgaatggccaccaaaatatctcttttaattaatttctgctggtcctctctgagcccacaaacacaatcctccaatcctcaacccatgtctccacatgatgcatgtgtgcaccactgaaaagcacaaagctatacactcacgtgagaggacgtttgggtgttgaaaattaataatagaccaaattaattctcctatttatgatgttaaattaaaacagacatgaaatggaagtcaaataagtgtacgagcagaaggtaaaaagttttctcaatgtatatgtaaagaagaaatcacaagacctagtttattaaaatattttcatgtttttcttttgatagtagaatatcttttaatcttatctaataagaatgatttaccatatttctcaattctcaacaatactctactatcttgggtagatgggatatgagatatcaagctctaatacacaaagttttattttatataaatagcaataccaatacataaataacaattatgggaaaaaaatgagttgagctcacttgagtttaactcaacccattaatatttaatttagttcgaaactcgacttgagtttttattagctcgaactcgatttagtttaaactcgtgaataactcgattaagctcgttagttcgaataatatgaataatagtccaaatttttaaatcctatacgttttaaaattttaaattattagtagattttaaataaaataattgtttatttttttaaagaaaaaaattgaacgtattctagttttatagaactataagatataacaataaaaaatcataattacaaccaaaattaatataaataaaactatttcatcatgcatacataaaataatagaaaattcatttaattataaaaatttaatatatatatatatatatgtgtgtgtgtgtgtgtgtgtatgtgcatgtgtgaagtcaattcataaaccaaacgggtaaaattatacgtaactcaagttcaactcatttaatttatgaatcaagtttaacgaactgattatcaactcgaatttcaaattatttttgagttgattcagttcattggtaccactaataacaattaaggacaaatgtattttaaaaaaaaaaaattgataaacttataactctttataacttctcatatccttattatattaataaacttataactctttataacttctcatatctttattatattaataagattacttgaatatgatataacattaaatatggagaaatgtccaaccttttttaaaagtgttagtagggatggtaaaacaaacttatccattgagtgaaaatagtcaacccatttattttggtaggttgaattgcaatgttaagcctcttgacccatttaacatgccttgtctaacacattcagaaataaattttacttaatgtctttttttgggtcttattagaaaataatattttccatcaatctttttttttttttttccttttgaagctttaattcataaatttacattataatttgaatataattcacgtttgaccatattgaatttagccctgctatatgtctcaactttcgtgtttgccaacaatggcaaaatcctagatcacaacttgggtcgattactagctagcctcatattccaatcttgactcactcaagtatcccccatgcacgagccttgtatgtaaaacgatacttaatgttatgtggatcacactctcccataacacgactcttcttattgtagatgcattgttgatgtttatagactacctaacatatcatctctcagcctccatttagtaagagggaaatagacaatttcaaatagtgtgaatttcaaattttttatactctattttaatttaaattaatattttttttcatctccttcactaaacaaaacattagacttctacatatatactagcttaaaatagtaagtgtttgtgaaaataaaatctataaaatatattagttcattatatattataaataaattaactcataaaattgtctcctattttatttccctagtgtgatgtggatttgaatgaatgatgtggggggactagggagggagtacagaagaaggcagaaaaataacgtgcaagattaggcatctatgaagggatcattcttatttcttaagactaagaaacactcttttttgtccgctcccagactcatagggaccaagacaaagacagacactgccctctgtttggaggcttaaccttaacgagtccacttttcttaacttgcaattaatattaaggtacacttcgtgagacatccaactttggaattgagtattcaaaccatagttgttacattcgaattttaatcatcttatctggtgaatacattgaaattacaactagatttcatggtcgtacgatatactgctcgaaagaaaaaatgtaatgctatttttatattattaattatatacaaattattaataatgatatgactttaattttcatatattgtcaatgcaaaataacattaaaaaaatgacaacttttagttatttgatttatctcatttaaattttattattttactatataaaataatttaccctccattaaataattaagggaaaaaactacttatttagtccttatacttgtacaaattttatcttctagatttcacacttaaaaatcctcacttttagtccttgtatatataagcacttttatatcttttttagttcctacttttacggttatacaaaatttaccttttaatggccttattattttttaaaggtagggactaaaaataatccaaaagtgcttgtacacaaactaaaagataaagtttgtgtaattatatggatcaaatgagtagtttttttccttcaaaaaaattaaataaaaaactatatcactatactactcaagagatctctatttaaaaaaatgttaagtattgataagatattcttgtttcttttgttaataagattagcttaaacaaacctcaagtttagtaccaatgaagcatacaaaaggtagaattaaattaaataattatttatttttattggctttggcaagaattagactcaccttatgttaatattatgcttataaataaaaaatgaatatcaaagaaatatataaaaattaagttaagtaaatgttattttaattttattaaaacttgtgaggttattaacattataagtaaaaaaaattatattaatgactattatatttgtatatatacttatatatatatattacttttgtctatataatatgtatttataataaaaaaatattatgtaaaaattactataatcctctttgttatttttttaaaataattataaggattaaaaaaatgtacataaaataaatgaaaagttaataaaaataaaatgaaacaataaactaaaaatattacaaaataaaattagaaaaaaatcaaaattagtattatatatattgattataagggaaatgtcataattaatattactaatttatattagatatattttaattctgaacatgaaattttataactatggtgtttttttttaccaataataactatggtgttaaatgttgaaaagttaaaattaaaatttaccattgttgcttttataattttaaagtcattgttatgacattttccaataactatgatgattaatattgccacattcttatatgcgttccttatcacagttgtcgaggctagatcactgttagcatctcgctatcgtcatttggcattgacattgaccaccactgtcgcaggaattgtaggaaaattggttttttttcttcttctacgtaaaggtgataactcattttctaaataaaaagccaaacaaccgatggatttgagtattaaaattctacgattcagctgaaacgaaaagaaaatcaaaatttatgcgggccatagaattttattcaaacatttgaatgcttagggagatcctaatatcgtcaataccacttattaaataggaatattcttttaaaaaatgtcgtgctaattcgaactctatttaatcttgcttctattaaaaaaaatgtttcaatttttacattattatttacgaactgctaattaaaacgttttctttcattagaaattaaattccttttagaacctaaattctgaaaacgataacctttgaaagatacttgcttcactcatatcctcatcattctctttccaaagaattttttattattattggggtgaccagcaaggagcaagcacgttatcttttatcaaaattttctccctgtatacaaaaagacttataaaagctaaccaacagttccctttataacaagccgaaagacttcaaagacatgtacgaagagaagaaaaagggcagaactttagacttttcactttgcaagagccaaccaacggtttcaataggatgcctatgattgaacaaggccacaacggggtttttagagtgtatatcaataatcctcaaaggcaaaacttaatgcttctggaatttatgttatggacgcataaataacatttagatgcttcaagttggacgtgaatcccaaatgccaaaagctaaatgaaacatacacggaattatgcacaattttgatacttcaattatggattcaactacatatatagtgttatggaacatgaaaaggtaaaacactggcagactttcattaatgagtatgaacaaatagttcaagtaaacttaacattacatctaagtcaaaagcttaaaacattaaattggtggatccttttcatgttatatgttattcaacatgtcaatttatattgaccaataaatatactcacacttgtcactctaacaatcttcatatgaaagtatgtgagtctttttcacattatatgttctccttctcaaatgaaagtctttccatttttttcttgataacatgctcaatccttttctcattttttagcttgtccatgtctctcttatagggtgtattacaagtttcattatcattattgtacacacaaaaagtctcattagttaataaactttagacacttcagctggcttaagaataaatgactctggttaatgtgcatacaacactgttcataatatccttggtctaccctttcatttctaaaatccttgatatcaggatgtttacctttaaaaaaagcctttgaactatccaaccgtacattattaaacctttgttttgacccaccaaaaccatggttaaatagggttaatcgggatttaacttttgggcttcttacgtgtaaaaatggcccaaattttagtcagtccataacaaaaagaggaaagttgggcttttccatgattattagggggtccaaaatcaaaatgtcctaatcctaccctttaattaacagttctctggggtggaatcacataggatcagaaccgtgggacccaccactccgacggcttttaagaacaggaccaagaagagttcaaagagaggttaccttcttcccttaaaatcatatcaacgcccacaaaaaaaagtgaaaaccttattggacgaatatgctttcacaggccttatcacgcaacatccaaataacgtccaaattaatttctctcttgtatggttccctttgtcccttgtttttgttttgtttctcgtctaatcactgtgtaacaagtttaactcctaggctataatctcatcttgtcacagttttgtgccaaagctcaacttaatattttgttcctaatgtggtcattcggataaaatacataatcaactacacgacagagtaaagataggaaaaagaaaatgctccaagtggttgtgttgtgtaactttcatgtgccgacattgataacgcttttaacagttcacaacatcatgcaattggtttgcaagtagtaaatcactaaactagatctatctggctttaatttccatccgaattggattaaatatttcattaacatcattattggtggacaatgtagaatcgaactacttttatcaacgaaagacaaaatattgagtgaatttatttaaattaaaaaacaattttaaaatatgtttttttaagaaatagatacgattttttaaaataaacagaaaattaaattttatttaaataaatacacaaaaaaacagaatgatatctattttattaaaataaaacttatttcaataaataagctcaaacaaacttattcattattacttgtttatgttatccatttaaaataatttttttattaaaataaatacttattttaataaataaatttaattaaactgatccattattacttgattatgttattcgtttaaataaagaagaaagaataattataattaaagggtattacaccacatttaacaaatattgcatcataatggtataaaaatttcactatattcgtatttaaagaataatatatatgtctcatttcacaagtaggattaatcttttaaataatggattaaaaaataactgtgttctctccactaaaataatattgcactgtaatatatatatatatatatatatatatatatatatatattgcctaatgatgtttttattgactataatgtatgagagttttgttggaattttcagcccccacaaatatttttgttgttttgttgactgacactggcaacaactcatacactgatgcaagtgactgcttccactgtttgtctttctctccctcacctctatttatatgtccagaaccccatacacttattcctacgtattacttcctgctacccctaattattcatttattctgtccatctttttttatcatttatttcattcttgcctcttggccactttaacttcctcactcgcattcaccgaagtcatgaacaaattcaacaaatctgaacttctagtgctctttgtccttgctcttctccttgggatcacacccttgttaccttcctctctgagaccaacctacctttacttcatctttaacgttctcatcattgcacttggagctgaagctggtcttctctcagttttttctaagcctttagaagacaaaaagcaacatgtttctgtcacccagaaacctgtaatgcccccagaagtgtatgaacctgaggaaagggtggaagtgggtgcctcagaatatgatgaaaagaagcctaaggttgttgaaaagcctgcttctgatgagaagattgttggtgtcactgaggtgaaaaagtgtccttcaatgccaaatcttttgctcataggaggtggagaaagtgaaggagaagtcatggatgaggagattgaagctgaagatgaggttgggggagttaatgggcaagagctgtttgcaaaagctgaggccttcattgggaacttctacaaccagttaaagatgcagagagagaattcttggctttatcaggaagccttttaggaacgcattagctttttctctctttaataaattatttccagggtgttaaatttagaaacactggttctgagggtctattagtttttaacccactgggtttgtacagattctaatttggaattagaggtcaggtctgtttactaatttcaatctgtattatcatcttctaagttcctgttaaaagaattttactgcatctattttcatgctccaacaattaaaaagttgcatgtcattaaaacatagcattttctattgaaaataaactgtggtgttttttttttcctgcttaaattaatgggagacgactgaagagaataagaccgggggaggctggaaaagtaattggagttcactgttggtaagacatgacatatgtaattatattgtaactggatttctgcatgactatcaataattgactggggtctgcgtatatgattatgatgtatgcttcatatctatcgtgttttataaagtacaagatgcagtatgcagattatgtgatatcaattcatgcatcttgcactcctaaccaaatttttgtataactaatcaaactttgatgctgtttaactcatcaaactttaagtctactttagcctcttaatagcaatggtttgcacaaactataattaagtagttaactagtaattatcagttttattaataattgtttatagtattatgcttaaggaatcaaaagtagaatttttttaatattattaatatattatttttgtaatttttaataaagaattatattagtttaaccattactcatggttagtaaaatcaattataaattactagttttaaagagttcttggaaacgtattctcactaaccatttatgagttgaatgcaactacttacttttaacatgtcaaaatagactagcttttagttaattaagcacaaaattgatctattagagtcaactagtaaaaataaaaaatacataagaatattaattctttagctctatttgagtcggtttccgtttttctcaagtcatgtgataactgatgacgtgaccagcttatgggatatcttattaaaaacagcatgttggatatttttctatgtaattggacgaatttttttcaaaacagtgcagaattcttaaagtgttacttcatgcccaaaataagtgccaggtaatgtttgatagtgccagctgcatataaaaaaagaaagaaagacgacgagtgttcaatttgacaaagatcaagccttattttgattatacatctgtcatgattctgtctaatccatcttatcaacaatatatatacagaaaaatatatgatccaacagttgttaatacccgttgctcaaactaaacagtggacagggtcttaatctaatttggggtatcatgtttctgtccccttaagaattttacaaaagaaaataaaaaattggcacaatgagaaaagcatttttatttgcacgatttttgttaatatttaaggttgctaaatgctaatggcaatgcactcatcctatgcatttactagctgtgtccaattgtcgtccgaaaaagcacaaatatttttcttaacatcaagaacattaattgttagataggtttatagacccctgtctatttcacatgaggtaaacatgttatgagatctctattattttttattatattgtactataaaatatttatcaatattagtaattaataattaatttttgttaataaaatattctctcgtgatcatattttatctatttattataaagtttaaactcaagaccaacacaatgttggtaaagacccatatcattatttatatgatagtgagacataaatttaaaatatactagatgttagagacacagtggacgtgttgtgtatcatcttgttgcataaaacttcttatatatatcaatcaaaggaatctaggtttaccatctcttctgaaatagttagttggttaccttagacgcggccttttagataaataagaatatatctattaacacattatctcttcttttttgtgtgtgcaaagaatcaaagaatagacagccaaatttgtccaatgactggcactgcagcagtattagaatagcactaaatttcaatatcttactgcggcggtattaatatgcagcttaattaagaggttgacaaatacaacactcagcggagtgtggagatatttttacactattagtaatccagaaaaacattaaatttagaaattcaacattttaatactctactttattttttgacaaaaagaaaaaccaaattacaatagtaaaattatattagtgtgcacagatgcacatgtcatttcattgaggttggtgacaaccaaaaccttactaggttgtaagtttctttgccccttaattttaaagcaaataataagttgtaatatttcacaacttttttttttttttttattttacagaaatctttgacacctaataagaatacaaaattttgtctctttatctagctctctaaaaataaaggcattgcgtagacattatattttggtatttcctgtggggtcaatttaccttggaatgttgcttgagaatctctttttttctgtaagacgttatcttttagattttatgttttatcttaataatagggatatggaaataagtttgattttatttattatttaatttttatttgtgtaataatagggaattggaatttgattgcctatggtccaaatacgaactactgcatgctgcaataatttgaatttgaacggttctgatttgtttaaatacatttaaaactatttttaattataaaattaaataacttggatgaatgagatatagtctgtattctccttaaaagaacaaaacaaaaaagaacataggttgtgcgttacaaaactaaagatgaagtattagacgataattcaaatatttgttaactgataatttatgggacaactttttcttttacataaaaatgtttaaatatatttttgatctttgatatatatttaaattttatgtttgatccccaataaatttgtcctttacatttattttctgatatttaaaaagttttgttttagatctctacagtcaattaaatgataatatgttcgttaaatatttgacaacacgatttgtgacggctcaaaaatcatcagtgtttctttcaaaatcacatttaaaacatatctcaaattttttgaagtaaaaataaataaatctcaatttgttataaaaagaatgtcctttccttctccctcctcttccgtgaccacctcctcctctgcgctgccaccttcaaccactcttgtgtcctatgtgtctccaccgacgtcgattcgtaatgggccctcactccgtcaccaccgtgggcttctgccactatagtcgcatgtcccaaatctccagtgttagattcccgcactcaccttcctccaccaagaaccatcaagggatacgcggtctgaacattgtgttggaataaaaatgattcatgctctcacaaatggaattgttttgaagaacgaatggcaacttgccctttcaatttggacagtcatgaattctggcaatgacttcaattgggtgttcaagaaggggttccttgtttgcagcagaattgggattcatagaatggtgtgttgcacgctggcttgatgccaatgaaggggtaagaaccaaatctgtattcatggcacgacacgacgaaactccgacaacgacgcaacaatgaccactcatccttcaactccttcatcatccttcacaatgacagacgaaagttgcggtagatatggattcgtgtggtgcaacatggtagatcttcgacaaggccatgataatgaccgatcccccttcaaccctgtcattgtcctccactacaacagacaaaagttgctctagatctagatttgtgtggttgccaccatgttattgttgttgcaatggtggaagtggttcggcaccgacgccaatggtgaggaccaaattattgttgtttgatttatttattttttactttaattattatggtgattcttaattgtcataaaatttatatttgattttgaaacaaatactagtgatttttgatccgtcacaaatcgcgttatcaaatatttaatggatacgtcatcacttaactgacggcataaatccaaaacaaaacttttcaaataccatggagcaaatgcgaaagaaaaatttgtcaatgatcaaacacaaaattcggatgtatatcatagataaaaaaatatgtttaaacctaatgaaaaatacccatcaattttgacaaactcctgaaaataaagaacattgtcgaaccaatgctcgacctataaaattgtttgtgttgtaagtggaagtggggaaccaaacaacatcataacaaaatgttgtaatgtgatttaattttcttatagtgtgctattcgtcttcttttaataatatgaatcaaattcacccaaatgcaaaagttttccaaaattatactgtaaaattgacgatgcatataactttgaacagttgtaatttctcgtaacaatgtccaattgagacgtattttatgtcaaaatgctcgaaattaagagaagtaattagataaataaagaatagcttgcaattcactaattgaatagataaaatatcagagaacaaaattttttttagggctccgaagattaaatcgcaaatttgaggcacttagagacctcttttgggaaatttttttgggaaagtcttcttcggaacttgttaagggctttttctctcaatttcgagcgcgtggccaccggtttcgcatcaatcggacgtcccagtcaaaagttatgaccttccgaagtttacgaaaacatcgcgccccattttttttgctgccacgtgtcaccacctcctcaaatacgccccatttgggcgtgtttggttgcaccagttttctaaattgtttccaaattacaccatttgccaaaattttttatttaattgtattatttgtaattttttgcccgatttaaatgtttagatttgtttaccattttttttggtaatagaataaaacaatttcaatagtgagattgcatagagtacgttttttaaagattaattatagataatgatgaagtcatcctcatcaattaaaatgcaaatattctttcgttccttcgagctagaaataccatttccgtttgatgtgtggcatttgatggtttattttcaccaatattcttcaactcccttgcatcttcaaagaaaaccaaaatttcatattaatttcattcgttcatggtcccatctcaaaaacattggcagatatgacaaaactaaattccaaagtaaagattaaccttatcttctaaagtctaaacaataaatgaaggtaaaaacttacaactaagatttagatttcgaccttccattcgcatccctgaggtccacactcacatcaagttggcagtatttgaagaaataatagaaaatcaaatgtataagataatcacgtacgatcacagctttttggtgcaaaaagggtgttaggagcccgtatataaaactgcaagctaaactgaataaaataacagaactagatatatggacaaaaaactaaattgaaataaatgaaaaaagacaattctcacatcaaagatttgtctttttcttttctgaattgtggagtacaagaatagaattgataattgaggttcatcatgcattatctaaaatatatataacaatggagaccgagcacaatctaagaactcatatccattcttactcaatgtgtttgcaagcatgagtctaaattaagtaactgcaaaagattcgacttgtgtgcaagcaaaagagacaagtcttgtgtgtgcaagcaaaatccattgaatgatcttgtgtatatttttagcatgcagatcatttgtagcctgctgcacaatgaacaaaacttctgtttttcgatttaacaacatatgaaccattgaatggaagaatctacactaaccagagatgagagatgacttgatgttcggttgagattttggatggaaaaaaattgtgcaggaaatgcgggagtgggagaccatccgaactacatatatattaaccatccacttataacatactactatattgaaagtttattaaaaaattcataatcctaggctagaaattttaatttttttacaacatataaattctaatatttaaattaattaaaataatgatattaacaattgagaataaaaaatcattattaatacatttgttttaaaaaataaattaaaaaactattcctaattttttcaatattttggatttaactgtgcagtcagaattttaaaattctaacccttattacattaaaaaaatactaacattaaaaaaatactaatgtactctttcaattactatatttttaggaaaaagagtatttaggcaccttaaattttatctcttctacaaatagacatattaaattttaattttagcctagttgattcctaaactttatcaagataccatgaacttaaatttcgttttaatcttctttttttgtgttactatttaaacatggatttgtgtatggttggaggcctttgaatgtctcttctaatttttataatccttgagtttaccgaacatcttatttgagtcaaagtgaaaataaaataattaatattatcagaacaatttaagacctacaaatgagaaaacaaataccattagagaaatatcacatatctaaagctaagttaatgaccaaagtttagaggagggggaacatgatcaaattaattaatgattaacatatggacttaacttaggatgattgtggttactaaagtgaattggaggatcaagaaagttcttgaacattcctatgtatgtttcacaatcaattgcttaaaatatgacatatacatagaatagtttctttatattaattaattttaagaaaaggaaaaaaaatccacctcatacctgaatttttgggcattgaaccaggcaaccatagagaaagataagatgccctgtcgaatgaggtttagttgttttaagtatgattcatgtatatatacttgttctctcatggccttagaagccatgtaatattttgaacaacttcaacttctttatttaggttctaaatatttgaaaccttcaatttacattaatatcttagtttacctcgacttgatttgctctcgttaagatatcttattttggaacttgattataattgtctatcaggtatcttagagtcatagaggcacatcccttattttatgtagccattgaactattggtttatttgattaattaagcatatttatttttatataaataattgcctataaggtatttagatttccagcggcatatattcatttattttttattatatgttattgccctactaagccacagatatttcttttaaaaggaattgtattcatgttttttataactaaacaattttttttctttaaaagacgaaaattttgccaccatttttataaacgtttattgtaagtcgtccaaattatgttgagataagtttccaatgattaagtcctaactccgacttggcaggtctttgcagaggtggaacacatgtcaaatgattaagcacatgtaaataaagcaatagatcgaccacaaaataaaagctgggaattcacatgtaattaaagcagtggaccacaaaataaaagtcataatgtcactcgcgttttaagaataaaaactacattgtaaagttccttaaatgtacattgtttctacattaaatagataaagattatccgcctttatactcaagagccattgtgtgcatgtttggattccaaataaaattgattttagtcccaaaaattatggtgaataattaaaaatgaagaaaaaatccaaaattgctttgcttgtgagttgtgacaatggaaaaataagtaagatgtggtgaccgtacctacccaaacacgcattgacatgactagatttgttattgtgtatgtacgggtatattatattttttgaatgtttttaaattttatttttataataaagtaatttatatcaatactttttgaaatttcataaaattattttactatatgaccgttaatatttatttataatatatatatatatatacctatttctgaatattgtattattatccatttgactttttttgaaaaacatatttttatagaatattaattaaatatcaaatttatgtcataaaatatatgaaaaatctatttatttatatatttatattaatattatactgataatatcaaatgttataacaatattgtttgtcaaatatactttattcaataatttataaattattatattcaaagtcaatatatatatatatatattaatatacatttaattttttttgtgtttaagctagttttatgaagtaattttataaaatatcaattgattataaaaaaatatttcgtctttttatagtaatttttactgctgcaattatgtcgtgtctgattttagaaaaaaaatcaaaatatattcaggtaattaaaaaaatgataaatattaaaattcgcctataaaaatgtatgacattgatttttaaaagataaaaatttaaatttaaaattcataaatataaaaaatataaaaaattaattttataaataatgtgacactaaatcaatttttaaatattataatttaatatcaaattaatttaaaaatataatttataataaaattaattcttaaatattaaaatttaataaaaaaataatcttataaatttaagagactaatttatcatatttttttatatattcaaaaattaaattcatatttttatctttcgtcacacttttaaaattataaaaataaaaaaaaaatctggaaggacttataaaaaaccttgttggtgagttgaagtgagagagtgtggtgagagtgagtgttgtgttgtttttgtttggttgtggtgcggagatggaggtgtgtttgctggaggaagtagagaatatcctaaggtacggatttcgaaacaggaagattctagaagaagccctgactcactcctccttcgtggacgctgtctcctacgagcgtcttgagttcgtcggagaccccgttctcagtctcgccatcagcaaccacttgtttctcgcttaccctcatctcgacccggccaactctccctcctccgcgccgccaacatcagcaccgagaagctcgcccgcgtcgccgtccgcaccggcctccaccgctacgtccgccacagcgcccctcccctcgtcgaccaggtcgagcgcttcgtcgacgccgtcaagctcgagaatcaccccgtctctcacggcggttccgtcaaggcccccaaggtcctcgccgacgtcgtcgagtccgtcgccgccgcggtttacgtagacgtcaatttcgaccttcagaaactatggatggtaccgtaccttttatcaattcatcatcacctttatgttagttgtatgttagtttttctttccttccgccctccctttttctttcaccgccaagctattcttatatctcctcgttatcacgtttataacaaatcagataaggttttaagttgcgtgcttgtgctctcgatgaatgaatgtaaattattatttgattatttgataaggttttaaattttgattgcattccgatagaagatacttgtggtctagacaaaatattgggaaaaatccaattcacacgtgggttagagatagtgccaagatagactatataagtcgagaacgaccctcataatttttggggttgaattggatccaaactcacattcaagcccaaaaatgctgggcggcttgtattggggaaaacccaagtcctagctagagattttaccaagatagactatataagtggggaataatcctcaccctatgagctagtttttgggattaaattaggtccaaactcatattctaagacaaaaagaattgtgattgttatttgtggtaaccaattcattatgatgacacctattataaatgatttttagaataagcttttacttttacattgaagttgctgtacgattcaagatgatgaaaatttgatttgtgataataattgtgattgtggcagataatgaggggtgttttggagccaatagtgacaccggatgctttggagaaacagcctcaaccagtgactatgttgtatgagatgtgccaaaagaaggggaagcaggttgatataaaacagtcaagggaaggagatgtaagtgttgctaaggtgtttgttggtggagagtttgttgcctctgcttcctcttctcaaaaggatcatgcaaagcttgaagctgccaagattgccttgcataaactcgcacatttggtgccttccaccgttaagaagtctgccactaacatgaatctcaactttactgctgatgaaaatggtaccttggttgttgaagcacccaaaaataaacttcgtgagatttgtgcggttaaaaaatggcctataccagagtacatgtactgttctttaacatgattttctttcagttcagttgcatgcgtgagtgaaacttttaacattccttgttgactaacttgttgcatcccttcaatggctcacagcattgaaaaggattcaggtccctctcatgaaaagaaatttgtctgcgcagttcagattccaactgctgatggtattcttcaaatgtcaggggatgaaaaatctcgggtgaaggatgcagaaaactctgctgcttccttgatgattcaggccttacagcaatctaattatatgtagaagagaattctgttgtaattttagggtgtcttccatcttctgttgtgattggctattgtttagaccatagcgcagcttggcatatgaaatcaaggtttttttttctttgacaattttttccgatccatatgaaatcaacttttcaaccttcttgtgacatctgtcaatttgtgaagggttgacttttcccatgtattgctttctgatcaagtagagcttcctattctttaattatttaaaatctaaagactcaaatttatgtttagatggagagtgaatctggaccactcattggtacctaagatcctaaaacctcaatctattttctcatttttagttcatgattggctgtgtgtatgttcttggatgttttatattgtgtgtttagttgtgatttgatcaaggaggtttcaatgggttttgattgaggagattcttctattggtcaactgaatgatcgaattggttcttcactcttatcttggtgagttttggacttgtttggattgatgaagagaaatagaatgagataaagtggaatataatggaataaaatttccagtctattggttgcatatattataatagaatggaacaaaattttcattctattatttggaagaaaaaaatgaataattattttactctcatattatctttaatctctaacaatctcctttacccatagatgaagagaagttttttatttttgaaaaaaaaaaaaaaaaaccgtccattcttcataatctcatctatttatctttatttcctgtgtttactggagttgctcaatcactctctcaacatcatctttattctttgattgcttgcaacccatgccaaggtatcaaattttcatattaaatctacgtaatttccatgatatttggtagttgagtgtgtgcgcggcaagttggagaggaatggaaggaagaataagaacgcagcgaaataaaatactgaaaaatatacctgtcatgaatttgaggacaagccacaacgtggagcaaaaccattataatcatgacgttgagagagaaaaatatttaccgtttcattgcatacaccccaatttggtgaggaaggaaaacggctaaaaatgataggattggatggaatgggttccatgactttcctagtctattccattgtttatttttcaatacaaacaatggatcttaatcccattcttccatctactcccaccaattcaaagaagggattaattttctacaccagccatttttctaatatattcagtatgtacagtgtaatatcgattttgtctttctcgtaatccgtaaaataaaaaacttatattaagaccaacagttcaaaagatgaaaaaaagagagttcttaaatgacatccctccccaagttcacatagtatccatttatcttatgccaagaccactctcctcagtggtaatctcattgatcagataaatggtatgctaattgccttacacctcctatgtagcattgtattggaacatgcttcacatgcatacatgttcatcatacatacccaaaaaaaagtagctcagaaaaatgaagcaaataaaaatcaagtttaattcatccaaataaaatattttatcgaaccaaattggtttaaaacaagattagtaaacttacagtttttgacaattcaccgcctatctccatactgcgcaggcacagcggaagaatctctgttgaaataaggaaacttatagctgctgtattatcaacctggtgaaatatcaacagaaaggaaattaaacacatgacaaaactcaagtataaatgtacatgtgacaagcaacaaaaaaaaaaaaaaaaacaatagcttcatcccactaggaaaaaaaaatcaacaatatcttgaagggcataaaatagttcggaaaattttgttccctgatactagcgatgaactaatcctaacaagttgatttgtatgtacctgttacatcatagaaaattattacaggaatcaatttgaaacttaacaaatagttgaaaatctacatgaacattataagattataacaagactaattatttgtggcaactaaaatatttacacatctacctgtgtgccatagatttataataatcaataatcagttattactgttttttaaatgacatattagttgaggttattccagtatttagtattttatggcaaggtttattgtgacaataatttactaattgaaattattctctgttcagcataaatgatgtataaaaaattattcttctcatagtctagtgtattcaataacagaatcagcaaggatgtagcaccttcactaaggtaccgatgactccaagaccggtaagcctcaaatactcaaatggcttggcctcactggttgtattaaggaagggatacagatatagaggtatatgagctgcagatgacaagaaggtaagtgtaaagagtgaacagagtaatatctttttcctttaagtgttagtttcaatgagcaaaaaccatgctgaaacggatatggtaatgtcaaagcaatctccttaattttatattaacaaaagaacaactaatatgcctttcaattgcccaaaagtttctttccatggatgcttatgaaagtatattgacagtaaaaaaaaatataagtatgactgaatgctaagaaagaagaacaagtggtatgacctataaattgaaagggagaaacttcattttctagtaagataaagtagaagtcctatgataagatagagagagagcaagttgcatataaaatttgtctgcatgattctgttttatatgcagaaaactttttagattatgtatggtcttttaatcatcaacatcaacaacacctttaattcaagttaattggagtcgatggtagataaattcaatgataaatacgaaaaaattgaaaaaaaaaggaaggaaaagagaaagaaaaagggtgaaagaagaatgagagaaatgaatgcaaaagaaaatttataaaaattttaaccatctttcatgaaattttatagtttaacaaattatttcttactttttaattgttagcaattggttgcttttacaatattttataacaattttaaataaatgcaaaagaaaaattattagtgagataaaaaaaaggaaaatatagttaggagatgataagatatcaacaatcattttatatttattgaaaatataattaggagatgataagatatcaacaattattttcaaagatactatttatcataaataatattatttagcaaacagaagttcacggtcttcagatgaataagaaaaaatatcattaccatggaggaatatcatccttgtatcaaggtgagatgccacacactgtaaaaaaatccatgcaaaagatatgtcttagtaagaatgcattgaagaaaaggagaaaaagatccgacaaagtatatgtgactggaccatggttctaaattgcacccggaatattgttgttgcagtgttgtccgcaacctgcagtgtgaatttcaatcacacaaaattccgcaacgcatctgctgccacctagccacaacagaaccatattggagcagcaacggaaccttagcaccgttctattccactttttttttttttttaaaaaaaaaatcacaaattcattctgaagaatgaaaattcaaatttttgtttatgaaagtgaaaaaaatataacaaatttatctctccattaattttcatatattatcgttaatattcatggaccaaattgttaacgcactacatattcagggacaaatttatcagctctttacccaaaatataatttaatcttcatattctctcttttttaatcagcaaacataacattacaataaacatttaaaaattaggaaaataagcataagttaaaacagacataataataagtataataaacataatttatttgttactctaaaatatctattataataacattaaataatgacaaaatcaagttaggtctcatctttttggtaagaattaacttaattactatgcatttttgtttggtcttatattttggataaattactgtcacattagaaatttcaaagcaaaaatatgagataataccttacctaaaatatgagactcaaacaaattaaaatgcaatcattaaattaatccttacaaaaaaatgaaactcaactttattttgtcattatctaatgttgttagaatataaattttagatcaacatacaaattatgcttatcaatcaatattacatttattattatgtttattttaacttatacttgttttcctaatttttaagtgtttattataattttatgcttacaataattagaaaagggagaataaaatggatagatttgtcacattttgttcactttcaggaacaaaaatttgaattttcattttacgggaatgaatttatcagcactctacatatttaagaacgaaaatgattatttacccaaaaaaataaaaaataaaaagatttagatttcaatcttctattctattttacatgcccggcgatggctactgcaatttagaaccatggactggactcattttcaaaccaattgatttttagagttaaaaaataatatttggggcaaattgaaatatgttgaacacacgatataaaacttgataggacaaggacatatcaattctcacctgaagaagagcaagagctttgcacactcgagttgattgtgcttgagtcatgtttggagctgaaataacagagtatactgaaactatttcctagaaagaagaaacaaatcctagtgagtggtgggcaacaaaggtcaaagaagcacctcttcattgagaaaaaaaaaactaaaaataaacaaattaggagcatgtttaattctctctttttataataaaaaattacattactcaacaatgaatatatcatctaaaatctattaagttttgaaaattgtttttgaaacaaacaaaaatgcatcaaagtacaaccaaattttcaagactatacataaaactctaggatttgaaacaaacaaggtattcaagaaacaaaatattatttatggggctattcattaataaaaaaatataaaagacaagaaagaataaaaaaagcaaaagaaagctaggagtgacaaaaggaatatgtaataataccagtaaaagtgctgcaatggtaccaaaagatttcgacaataatggagcaagatcctcaaataagtctcgcatctaaaatatataaaatattaaccgtgtgagccttgaaacgacgacgcatgtgatatagcatatggaataatggggcgttgtaaatggggtgttatacagtacttaattggactattaaaacgacgaatgagagcggaaaaacgacggaaggtaagtactaccttggagagctcatggagagagtttgctcggagagaaggattgctgagttcgacaacgaggttttccacattcgccatcctgctgcgatccttgccggtggcagaaggagctccagacgacgcgtcgcttgtggaggcggattcgggtaaattcgtcattcactctctaagaaattgtattattatgtgcattgagtgttatatatatatgtgtgtgtgtgtgtgtgtgtgtgtgtgtgtgtgagtgagtctgtgagtgagtggggtttagttcttgttcttgttcttgtaatgccaacttcctaattactattatctatcatgcaacgaaatggtgcgtagtggaaggagcctgcgacacatgatatgatatgctttgcatgcaaactaaaacgctcgtttctatcaccgtgcgtgtccttcctaattctttcaactttatcattattaattatatggaaaatgtttattagccttctcttatgaaattaaaagtctaaagtttttattgaaaaatttaacaatatatttattcttaccaaaacctggaaatttgaatagacgaattcaacttggttccaaactctgatggtccaagtgtgtagagtggttatagcaacaaataagttgttgttgataagagagacacattgttgagtgttaacgtccagttccgtggacacatgtacatttactataacaaggtgatggacacgtgtatatttattataatatggtaatggacacgtgtacaatgcataataattttactaattttgtgcagtacaatatcctttcataatctatacagtaataaaagaacatttttctgagtacgtgtcaacttttggtgcattctcagcttcggaatccagctggcaggttcacaataaatcttagcttcggatgccacatgtcagcgccacatttcgtctcattttctcagccaattccaaacctctgtagggacatgcgcaccctcagctttgttgagttcaacgagcaaccttcagcaaatccgaaccgcgctccaagatttcaaatttcttcttcatcctccaactctttttccttcatcaatcagacaatttctctctcccacgtctcaaatgctgacatttctggttaatcctcacctactattcttccttcacacggttcgtttctcagttactctcttgtctctatcatccattttcactcacctaaaacaacagttcgtttggaaaaccctaaagcttcaccgatgcaccgtcggtgttcaagggccctgcgttgcgctgctcgattttgacactaaggttttcatgaaggagaagattaaccttgccggacataaattttcatctcacacaacagtgtgttctctttcttctctttctttgcgtttcacttcgcttttgttatgtggggttttttttttcagatggaattgagggtggtggcaagggagagcactaccaccaggtgctactgtggaaaacgaggagagccatggctgctgaagaagagaccacaaggttcatttctaccttttgctttctgccttttccttttcctttttctttttctttttttagaattaagaagagggaacaataatgttgtgttggtagagtaaggtggaaaaaatagggtctttacttccgtcggctatggctccagctggataccagtgaatggtattccctctctcaaactttccaccttttttttcttctttcaattgagtgatgagaaaatgacacattttttgttcccctgactactgggtggattccaagttagacatgcatatatgtttaagacttattttgtaaagatgagtagggagtatgacccctaatgattgtttttttcatacataagtacagtagctctgtattcagcaaggaataggcataaaactaataaaaatcttactaatattacaaacaaaatattagtatttctaagaaataataattaataatgaacaagatcagggaaaagtaaaccaaagaacatgatagtcagtcctttgcagcagatacttgtatgattttttttttatatacattcaaaacaccttgaaactatccattcggctttgacttcccaaactgatgactttgctgtttgcccatcgcagaatatcagcatcaattatttccttcccatgcttattggttggatctattgacaaagattttcactaattttttttgtcatggaataggaatctgtaatttgcttttacattagtagttgtggttaattgtggtttctgctttgctgtgattttttgttccattttttttatattctttgtatgtgtgttgtgtccccttttcactaaagatgctattactcgatttcattcagtgtgcgtagtagtattttatattttttttcctttctgccaggtttattaatgtttgttggaatttggaagtaagctaggtatattgtgtggctcttttttgagatttgaattgatgatgcggtagctttgttgttatatatatatagatatattgggtgccttaaaagtttcttcctttttgcattagtaacttgtggggtttctttgtttctcagatgtgggcagatcttattcaaaaggccaaggacggaggtttggatgtgattcagacttatgttttctggaatggacacgaaccttcacctggcaaggtagctcaaaatagaaaaataatggcttttagtttttctttcttgcattcataaagctggtgagctggtgctgtaatcaggcctttgtgtcaggattggtccttatgtctgtgttgagtggaactttgtgtaatgaacgtgttcattgcaaaaaaaattgatgcatctcaaattagaaatgttaataggttttctttgattggttttcagtggtttccctgttgggctaaatgaattgtttgaatatttgctttgtggtatgttaaatgagctttttgttgattgcatgatgttcatgatagggccttattttattacaggcttctgcaatacaaagtatagtggcagagagtgtgtttaaccctccaaagcaagcagtttcaatatttgctgatactcagagcagtgaaatcaaagatcgcatatttgatgaatttaacaatttttttgttgtataccaaaaggtaagtaatctactcgcttccttcccagtggctttaatgaaacaaattattcgttgagtttggactaatttgaagtacttcgcaccatttcttaatttttaaaaaaatatttcattcactgacacatatattttattatacagtatcaagaaataaaacattgctcttttgggccatcagagaatacaaattattttgatacactcatgtgcaagttgtgcaattgtttggtgggataccgattactttaggacgaaatgcatttaaaggattggaacaatggtatgcttggcatgaatgaaaaatcatgtctggtttctctattcttattcacgcttttctttgaaacaggtgtgttattcaatttaatcaaaaaaaatattcataaacttgagtcgtgcatttgcaggatgcagaaattgaaagaagaatccagttagaaacaaaggctaaaagcatattcagaaacttttattactaggtgtgactttccttattttatatagtaatctgttggagtttagcaattagcattaatacgtaatgtggttgtactcccaagagtttgaaggaatcatatgcgtgtgccacatattgtttgaatggtataattacatataaatctgtcttttatttttttaaatttcaacaatgcgcaatgctgtcatgattatgaactgctgaggagaagcttaaacacagtttatttggtgatgatgaaggtatgctccagttgtggtggtttattcttttggttttacattacagtaataaaagaacattttgctgggtacgtgtcaacttttggtgcattctcagcttcggaatccagctgacaggctcacaataaatcttagcttcggatgctacgtgtcagcgccacatttcgtctcattttctcagcctcgatcgcgattaaagttctgggtcagtttgattaggtacagttttcttcaattggactgagctataagactttcacattttcttttctgcttgatgttttgaataaactttttaaatacagtttccacaaaggaagtcattcttgggacaaaaaatggtcaactttttgaaaatgtttctaaaataattgaccctcaatattcagatggggtggatatgtctgaagtgcaggtatcaatgccttctcaataaatgatttttttttcttattgatacagctcccattctaacagaactatgcaattatacaggatgaattctcggtcattataacaacatcattagtgaccttagtccatggcctggaaactaaatttgacatggaaatggctgcaatgacacatgtcccttggggtattcttgagtgtgtttgtgatcaatcaaagttgaattccttaataaaatttagcaaatgattatcattccagacaaagttcattagtttaactgtactattttcttgcaggtatgttaatgccataaatttgatcctgaccactagcattcctgcacttggaagtcttctttcaattgtctactttcagttctttctggataaggtgattgattgtaaagtgaattaatgcatgaaactatggttttttacatcaagactgacattaaggacaatttcttttctaacataataattacaggttttataattaatataattgatttttttttattttgtaaataactttcattttgaatatgtcattctgttatttcatattttttaaccaatcaatagatttcatcattatttcataattacatatcaaacaatcaacaatatttatttttattaaatatattatttatttttaaattttcatcatataaataatggataaataacagtaaatttaagtggtgacattttaaaaaaaatatttatagtgttattatttaaatttaatcaatatttgaaatttttaaactctttgtatttaatttatttgttacaataaccacataataatatttaattaatatattattaaaaaataatagtttaattatttgttattggacaattaaagttaatttaaaataatttatcatggagttttcatatctaacaaacaacattgtgcattggattattggttcattgtaacttttctaattcaactcaaccaaagttgaactctagctttattttttatttttgttaactatatctatcaacatttcagtacattatatttaatattatcgaatcttattatatatgatttttagtaatgaatattttcattacacgcatttaaaatatatagtcaaccaaatcaaaaattctaattttgttttttgtgttccttaactacctctatttgatgttcatattttttgtaattaacattataaacttatgttacaatgtttgcatattatatttcacattaatgaatcttattatattttcttttttcatctccaattttacataatgcgataatatgcatttaaatgtataattaacccgtgcgtattactaccttaaggatacaggtttcacaacggtctgttttgaaggaagaataacatgcaagattatgtttaaccaccggagaaagagtgctaaaataggagctggttggaaagcttttgcacgagccaacaatttaaaagctgacttcgagtttattatggagatttcatacccaagtagcaacatagtacactggtggatgtattgattgcaaaaaacagctcttacctgtcagcttttaaatatgcatgttaatagaaactacatggttcagttagaagttgtctcagtttgtagccactgtctcttaaacttatctgctttatcttgcactatttaattatgtccataagttgtatggataatactatctatataaattgcttttatatttttctttaccttttcgatcaatcttaaactgtttaacgcgataatgtgcataataatatataattaacccgtgcgtaagcgcaggtcaaatactagttttcaatacaatttcaatgattaaaaatttctattttttattctttatgaatttttgtaagtaacttaatttatattacttcaatcttatgtagttcaattaattttctctctaatagtttttatattaataagttgtctaactcacaaatattttacttatatgtcctatatttactataaagttaagtaactcgtgaatgataattacttatataaataactctctaatttaaattaattcaatatcacattagaaacactaaaataatatttaatttttttaagtaactctcattatagatgctctcattattatatagattaaaatcaaatttttaaaaaagaaatggataattgttttattaatgaaataattatcaataataaatataataaaaaataaaaaatacatgtgtttgaaatttttaattttgatgaatttaaacatgagtttaattaataaatattaatttttatataagtatacataaaatgtgaaaatgtaaattaaaaagtaaagaattgttgttttattaatgataaatataaaataaattattaaatatatgtttaaaatttgtaattttgaaataaaaatatttaatgttaattgaaaaaataaatattgatacggatagataaggaaattaaaaaaaaatgaataaaaaaaatgatataaaaaatatgttatgaaatgaaaaaggttgaaggggaaatatttagtgtaaacatttaagaataaaatatataaatttgagtcatataacgttaaataattaagattaaaaattaattaatagtcacatgatgattttaatttttaataaattatctttatttatcttttaacaatgatcatttagatattagctgatgatttacatttgttaggacaaatgataaaacaaatctttcaaatgttttattgatttatgtgaaggggtttagttcatttgattaaatagagtctttgagttatcgtaaatttttttttatacttatcaattttcacgaataaaaagtatattttgaatgatcttatattaagagctaaattgactaaggaaatgagtcataatcattatggagaacatgcatggtccaacaatcttttatatttaataactatagatagtattgtcattaacttagccgttttagaaccatccatgattggggaactcattgatccatttgcaactccttagaaatattatctgaataatatttctttctcatacttcaaatgctttgtagagtgcttaataaggtgttcttttaatagtttccatacctataagattattaacgatatcctttttagataatgttaataaattccaaaattcattatgtccttcagtcaccactatagtaatgacgactatcttttctattggtaatgtagttgttctttggttaagtattgaaataacattacccattgagaaatccctgtattttttaaacttacaaaattgattcaattttaaaataaaaatagaatgtgatgtgtattgtatatttaaggagaattcttttaaaacaactaatttccaaatacatctatttcattttagatctattctaaacatatgaatttgttctaaatatttaaattacatattttcttattgtaagtttatcaaaagaaagaaataatttctttcaaaagatcatgtgatacacttgttacaaagactagtggtgacagatttggataatacacataaggtcatagtcgtaactaggttcgaactttaatatgatacacgcacaaaaacttattacgaagaaatgatataatttcttaaacaaggagatagcaaaacacatttttttaaattaattataatttcatgtaacatcttcatactgattttctagttttttttattaaatattttttctatttttaaatattatataaatttattatttataaaatatttggaagactaattaaaagtatcatttcttataaaagagtgaaaaaattaataaaaataacagataaaaaacataaataaattaagaagtaattttaatataaataaaaagatattaataaggacatatattaagtggtctttatatatatatatatatatatatatatatattcttaactcgtcttctttgttcgatataataatgaaacaacctaaaaggaaaataaattactatcccacaagtacaagtgaatgtctacttcattttttcaattaaaaaattcaatcatattattattgtatcaaaaaaaaaaagtcatgacccacctactcaatgagagcaagatgtcgtccaaacacgcacttctaaaaggaatttgacttggttataaaagaaaatctgaaggaccggacttggaatgaagtgagacagggtgagagtgacttttgcggaaaggggaggagataggggggttaggatgggccacccccaaattttattaatataaattttattatatatattaaaaattaaaaaagtaatttaataataaaaaaaatatattacataatataataggatataatattttttaatattacattaaaaaataggataaaatatttttgaaactgcattacataatataatagaaatctttaaaattacattacataataagataaaatattttttaagattgcattcaaatatagtatataatattttttaatattgtatcaaaaataggataacgaatgataagtattataagtgattatcaggcaaggtttttaatttcatttgcaatgctgaatcaattcattatgatgaaaatgaatgacaactattataaatgatttttagaataagccttcttttggcacatctcatacaacatagtcactggttgaggctgtttctccaaagcatccgggtgtcactattgcctccaaaacacccctcacaatcacaattattttcacaaaccaattttcatcagcagtaaagtttacgcaagccaatcttggcagtttcaagctttgcaagatccttttgagaaaaaagaggagttcctcaaaccagttcgattaacgcttcccccttatcttccacgtcaatatccaatgctttgggcattagttgctaatttgccatctttgtcgctgaccaccaccatgagatgagttcctttttttttctttctttttttctatctccctgacacatttagttcatgattggcggtgtgtatgttcttggatgttttatattgtgtgtttaggtctgatttgatcaacgaggtatcaatgggttttgattgaggagattcttctattggtcaactgaattatcgaattggttccttactcttatcttggtgagttttggacttgtttggattgatgaaaaagaaatagaatgagataaagtggaatataatggaataaaatttccagtctattggttgcatatattataatagcatggaactaaatttacattctattatttaaaagaaaaaaatgaataattattttactctcatattatatttaatctctaacaatctcctttacccatatagatgaagagaagttttttatttttgaaatatatggctcattatgattttaatatttgcattcaattaagaggtgactatgctcatcagctcatgtatacttcactcttaacatcaaacggaaagatagttcccttcccattcaattcttcattctctctatacatgcccaactgaaaatcctattttatatatgtagaaaccccagaaagtcttgttctcacgaccccgtcatatgatcggatcctcctccaccttgttgtgcaggaaacggattgactctaatattatgaagcaactgctgtagccatctcctagctgttgggtgttcctgaataaataaaaccaaaaccataaaaaaatgtaaacatcctaaaaccataaataatgccctattgttaatcttcaattcacgtaatcaactcacttcaatcttattgattaaatcaaatttttatactaataatatcacttacacgaaggcaactactgaatgtagcatctcttaacacggctggaagacaggttcttaatgcatgacaaactctgttttgaaatgaccaaagttttattagaaacttgggaagaacgtaaaggacatgggcagaactgcagaagcacttataaaacggcaaaaaaatttaaataatgctattttaataagaaattacgaaaataatgcattttgaaatcaaattacgcatctactgcttccattcgcgcttgagctgaacgtgttgaatcacatcatgggtggacgtgatcagaaagcattcacgggcacctgagacgtgttgagttacgtcaatggcagacgtattcagcgttcaatcacgtcttgcagggacgcaacttgcactgcatcacgtcgtggggagacgtgttccagctccattcacgtcctagagggacgtgtatcagctccatttacgccctgcagcgacgtgatcagtccccattcgcgctccccagggacgtgtttcagctccccctttttatacacccacaccccagccacacttgccactgcctctctaaactctctttctctcaaatttttttctctcatttgaagcaaggaagcaaggaaagtgcaaggaaggtgcaaatagggtgcaagcaaggaagcaagaagctctatataaatcaagttagtagtagtaaaatatttttatttcttttgagttacttgattattagttagtgacttaaatgcttactaggttagttagttgttagggtttaagtagtgacttagattgttaaatagttagttgttaaggtttaattagtgacttagattgttaaatagttagttagtttgtgagctaggttaattgtttgttattagtttgttacttaaattgttatttagtgacttagagtattagatagtgacctagattaggacctaggtctatggtttaggtaaatattttctatggtttaggatacaagtgggtgacctaggttacttgttagttgttagggtttagttagtgatgtagatttttaaaatagttatttagtgggtgacctaggttaattgttagttgggaaaaaaattaatgaattacaatttaaaaaagactacaaaattgtagcaatttgaaaacaaattatagaattaattaattagtattaattcaataaaattttagaaaaaaaattaaatacaattgttttgttaaaataaatgaattttttatatgtgaacataataagtatttatatcactccaccaattctatgattatataaagaataaaattgtattcaaattttaattcataacttcctaataagaaattaaatatgcattaaataccatatattatttaaaatagttaatttaaaatttaaatatttaattctataaaataaaagaaaaaaagttgtgaactaacaatgtaaatcatcttatattattatccaatcaaaaaccatcctctaggataatcttattggctttttataataactattttaaaagttatattaatttttttaaaataattgtttataataacattgtaattttttacattaataatcatcaacgttaaactctaaataaaaaagcatgtagagtcatatttcattttctttgcaaaatcataatttaaagttattgtacaaatgagcttgtattttatatttttttttttaatgaaaattgttgacatacatagttaatattgatgagatgactaattgtgatgacaataaggtatatagcatattgaaacacttgtgactagaacaaaaatagacctttttatcgttggtgagttagattattagagagtgacctagattacgaagtagattatcagatagtgacctagatacataataaatttgtaaaaataatttgttagttagtgaattaaataatttgtatttaaaattagggtttatattataatataattataaaatgtgtagcatattattatggctgagtcatcgtcatctgagtcacctcgttctggctctgaccgggagcatgagcctatcgatcccacaacgcatgttcttcccggtccatatagatgggatgtacttcgaaggcggaggcaacgcactcacatttcacaggcagtgtggaatgaggacacacagagagagctgaagatacgtcgcacaggtagactcattggtggaccccgacacgacgatatccatgcaggacgtgtctagggcaaagtcacgcccagccaggacgtgttccagcctcatttacgtcctcccaggacgtgttttaacacgtctcagctcgacgtgttttaacacgttttgtccagacgtgtttgaacgcagtagatttgcaattacatttcaaaacgccatattttcgtaattttttaattaaatcgcattatttaaatttttttgcccttataaaactggagttactatctacttaacaaacctctgattttctgacagacgaagataacaacgaataatgaccttcaaaagactacacgaaggttgctgaacaagagttaccaccatcgttccgaaaactatatatacttgaaaaaggcgccctgctgaagtacaaatatgtttcataccattttcaaccgacagaatttgttcaactataaaggttccaacatgcagttggtggaacttccattagattacacacaaattttcccattacaattattttgataggcataaaaagaggatcacgagatagtggcaaaaacaaacacatggcttagcatttacaatgcaccacaagaagtacaacgcaagagttaaacagacgtgttatttaaagatttagatctcaagtatcaaggacggggtatttcaacccatgtaactacaaatactggtgttgagttgcattttgatacaaccaagaggagtgtttgcaacactcttaaaattctttttattttttattagtttaaatttattgaaaattataatagtggttcttacttctcgtttgatgagtctctgtcctaatttaaaagtggaacttaccaaagtttgtgattttcaacaaatttcaaccaataatagaatgttaaaaggagtattgctagcactcttctacaaccaaatatgtcaagaagagtttcaacagtcctgtgataaccactaaaaaaacttatattaagaccaacatttcaaaagatgaaaaaaaagagagttcttaaatgatatccctccccaagttcacatagtatccatttatcttatgccaagaccactttcctcagttgtaatctcattgatcagataaatggtatgctaattgccttacacctcctatgtagcattgtattggaacatgcttcacatgcatacatgttcatcatacatacccaaaaaatgtaactcagaaaaatgaagcaaataaaaatcaagtttaattcatccaaataaaatattttatcgaaccaaattggtttaaaacaagatcagtaaacttacagtttttgacaattcaccgcctatttgcatactatgcaggcaaagcggaagaaactgttgaaagaaggaaacttatagctgctgtattatgaaactggtgaaatatcaacagaaaggaaattaaacacatgacaaaattcaagtataaatgtacatgtgacaagcaacaaaaaaaaaaaaccaatagcttcatcccactaggaaaaaaaatcaacaatatcttgaagggcataaaatagttcggaaaattttgttccctgatactagcgatgaactaatccgaacaacttgagttgtatgtacctgttacatcatagaaaattattacaggaatgaatttgaaacttaacaaatagttgaaaatctacatgaacattataagattataacaagactaattatttgtggcaactaaaatatttacacatttacctgtgtgccacagatttataataatcaataatcagttattactgttttttaaatgacatattagttgaggttattgtagtatttagttttttatggcaaggtttattgtgacaataatttactaattgaaattattctctgttcagcataaatgttgtataaaaaattattcttctcatagtctagtgtattcaataacagaatcagcaaggacgtagtaccttcactaaggcaccaatgactccaagactggtaagcctcatattctcaaatggattggccatactggttgtattaagcaagggatacatatatagaggtatacgagctgcagatgagaaaaaggtaagtgtaaagagtgaaagagtcatatctttttccttaaagtgttagtttcaatgagcaaaaaccctgctgaaacggatatggtaatgtcaaagcaatctccttaattttatattaacaaaagaacaactaatatgcctttcaattgcccaaaagtttctgtccatggatgcttatgaaagtatattggcagtaaaaaaaatataagtatgactgaatgctaagaaagaagaacaagtggtatgacctataaattgaaagggagagaaacttcattttcaagtaagataaagtagaagtcttatgataagatagagagagagcaagttgcatataaaaattgactgcatgattctgttttataggcagaaaacattttagattatgtatgtatggtcttttgaccattacatttaatccaaattaattggaggttgataataaatgaacttaatgataaatacaagaaagttaaaaaaaaaaaaaaaggagaaggagaagaaaaagagaaaataaaataaaaaaaaagaaaataagataaaagaaaagaatggtaaaagaaataggagagaaataaatgcaaaagaaaacttataacaattttaatcatcttttatgaaattttatagtttaacaaattatttcttacttttaaattgtttgcaattggttgcttttacaatatcttataacaattttaaataaatgcaaaagaaaatttattagtgagaaaaaaagggaaaatatatctaggagatgataagatatcaacaatcattttatatgtattgaacatataccgtacaaaagcaaagtttgggaacaacatcaaccacaaaaatacatgaatcatgcaatgccgtttgactcagttgaagaccaaattttcaaagatactatttatcataaataatattatttaccaaacagaagttcacggtccttcaggtgaataagaaaaaatatcattaccatggaggaattccatccttatatcggggtgagatgccacacactgtaagatatccatgagagcaaaagatatgtgttagtaagaacgcattgaagaaaaggagagaaagaccagacaaagtatatgtgagtggacctgaagaagaacaagagctttgcacactcgatttgagtgtgcttgagtcaggcctggaggtgaaataaaagggtatgctgaaactatttcctggaagaaaaaaaaatcctagtgagtggtgggcaacaaaggtcaaagaagcacctcttcattgagaaaaaaaaaactaaaaataaataaattaggagcatgtttaattctctctttttataataaaaaattacactactcaacaatgaatatatcatctaaaatctattaaggtttgaaattgtttctaaaacaaaccaaaatgcgtcaaagtacaaccaaattttcaagactatacataaaactgggatttgaaacaaacaaggtattcaagaaacaaaatattagtcagtatttatggggctattcattcataaaaaaatataaaaagacaagaaagataaaaaaaaaaaaaaaaaagcaaaagaaagccaagagtgacaaaggaataagtaataatacctgtaaaattgctgcaatggtaccaaaagaattccacaataatggagcaagatcctcaaataagtctctcatctaaaatatataaaatattaaccgtgtgagccttgaaacgacgacgcatgtgatatagtatatggaataatggggcgttgtaaatggggtgttatacagtacttaattggactattaaaacgacgcacgagagtggaaaaacgacggaaggtaagtactacattggagagctcatggagagagtttgctcggagaaaaggattgctgagttcgacaacgaggatttccatatacgccatcctgctgcgatcattgccggtggcagaaggagctccagacgacgcgccgcttgtggaggtggattcgggtaaattcgccattcactctctaagaaattgtattattatgtgcattgaatgagtattatatatatatatatatgtgtgtgtgtgtgtgtgtgtgtgtgtgtgtgtgagtgagtgagtggggtttagttcttgttcttgtaatgcaaacttcctcattactattatctatcatgcgacgaaatggtgcgtagtggaaggagcctgcgacacatgatatgatatgctttgcatgcaaactaaaacgccccgtttctatcaccgtgcgtgcccctcctaattctttcaactttatcactattaattatatggaaaatgtttattagccttctcttatgaaattaaaattctaaagtttttattgagaaatttaacaatatatcttctcttaattttcaatacaacttcaatgataataaaaaaagtctatttttttattctttatgaatttctctaagtaacttaatttatgttacttcaatcttaagtaattcaattaattttctctctaatagtatttatattaataagttgtttaattaacaaatattttacttatatctcttatatctattataaagttaactcatgagtaataattacttgtataaataactctctaattttaagtcattcaatatcacattaaacacattaaaataatattttttttaaagcaattttcattgcagatgctttcattattatatagattaaaatcaaatttttaatccttatgaaatagtttactggtaagagggagtatttattttattttaacatctttgactgtcaatctttccaataagaattatttaatgtttattttaaaataatttaaaatacttgacaaggtttatttaatatttttaatcaatactcatgaaacgacataatatatatgttaataaatatcaatcaattgttggtcctagtgatactggggcaatgccttcatcctcttaaacatgtcttgaattcaaatattgtaatgtaaaaaataaaagtgataacaaagaaagatacactaatcaatcaagttttcaataaaattagtcactgaccaagtcggtaattctatgtacaaataacatggtattaaaaaaatatgttaataaatatacatcaaataaggaaaaagataacttaaaaaggaaatgaataattgttttattaatgaaataattatcaataataaatataataaaaaatacatatgtttgaaatttttaattttgaaaaattttaaacatgaatttaattaataaaatattaaattttatataagtatacataaaatgtgaaaatataaattaaaaagtaaagaatggttgttttattagtaataaatataaaataaattattaaatatatgtttaaaatttgtaattttgaaataaaaacatttaatgttaattgaaaaaataaatattgatatggatagataaggaaattaaaaaaaatgaataaaaaaatatgttatgaaatgaaaaaggttgaaggggacatattcagtgtaaacatttaaaaataaaatatataaatttgagtcatataacctcaaataattaagattaaaaattaattaatagtcacatgatgattttaatttttaataaattatcttcatttatcttttaacattgatcatttagatattagctgataatttacattggttaggacaaatgataaaacagatccttcaaatgttttgatttatgtgaaggggtttagttcatttgattaaatagagtatgtgagtaatagtaaattttttatattttttcaattttcacgaataaaaagtatattttgaatgatcctatattaagagttaaattggctaagggaatgagtcataattattatagagaacctgaatggtccaacaatttgaatttgaacggttttgatttgtttaaatacatttaaaattatttttaattataaaattaaataacctggatgaatgagatatagtgtgtattctccttaaaagaacaaaacaaaaaagagcataggttgtgcattacaaaactaaagatgaggtattagacgataattcaaatattggttaactgataacttattggctaactttttctctcatatagtaaaaatgtttaactatgtttttatccttgataattttttccttttccttgatatttgaaaagttttgttttagatccctaccgtaaattaagtgataatgtgtttattaaatatttgataagtagtgaatcaaaaatcatcgtacttgtttaaaaatcaaatttaaaatagatctcaattttttttaaaagagaaggttcattccttctccctcctctttcgtgaccaccttctcctctgccaccttcaaccactctcgtgtcatctatgtctccattgatgtcgatccgtagtgggccctcactttgtcaccatcgtgggcatctgccaccgcagtcgcatgtaccaaatctcccgtgtcaaattcccgtacacaccttcccccatcgagacaaccatcgagggaggcacgatttgagtattgtgttggaataaaaatgattcatgctcttacaaatggaattggtttgaagaacgaatggcagcttgccctttcaatttcgatagtcaagaattctagcaatgacttcaattgggtgttcaagaagggttccttgtttgcacaaaattgagattcatagaatagtgtgttgcgtgctggcttgattccaatgaaggggtaagaaccacattagtattcatggcacgatatggcagaacttcgacaacgaagcaataatgaccactcatccttcaaccccttcatcatccttcgcaacggcagatgaaagttgtggcagatctggattcgtgtggtgcaacatggtagatcttcaacaaggtcgcggcgatgaccaatcccccttcaaccctgtcattttcctccgctgtgacaaacaaaagttgctccaaatctagatttgtgtggttcccaccatgttgtaattattgttgcactggtggaagtcgacatcgacgctaatggtgaggaccaaattattgttgtttgatttatttattttttactttaattattatgacgattcttaactgtaaaaaaattttaatttgattttgaaacaaatactgacgatttttgattcatcacaaatcgtcttatcaaatatttaaagtgcacgttattacttaactaacgacatagatctaaaataaaaatgttcaaatatcagggaacatatacatcaacatcaacaacacctttaatctaacttaattggggtcaatggtagatgaatccaatgataaatcaaaaataaggaaaaagggagagaaaaaaagctaaaataaaagaagggagaaaagaggaggaaaaagactaaaacaaggaaatgacgggaacataaaactactaatatatatcaaagataaaaaaaaatatttaagtctaataaaaaataccaatcaattttgacaaattcttgaacaaggaacattgtcgaatccatataaaattgtttgtgttgtaagtggaagtgtggaaccaaacaacattataacaaaatgttgtaatgtgatttaatttccttatagtgtgctattcttcttcttttaatatgcatcaaatgcacccaaatccaatctcaattttgaaaatccatattttcaactgtgtatttcttaagacaatgatttaaatgtttaggtttgtttaccattctttttggtaatagagtaaaacaattttaatagtgaaattgtatacagtacgttttttaaagattaattatacatgatgatggagtagtcatcatcaattaaaatgcaaaatgttctttcgttccttcaagcttgaaatatcactttcgtttgatatgtgtggcatttgatggtttattttcaccaatattcttcaactcccttgcatattcaaagacaaccaaaatttcatattagtttcattcattcatggtcccatctcaaaaacattgacagatatatgacaaaactaaattccaaagtaaagattaaccttatcttctaaagtctaaacaataaatgaaggtaaaaacttacaactaagatatagatttcaaccttccattcgcatccctaaggtccacaatcacatcaagttggcagtatttgaagaaataatagaaaataaaatgtataagataatcacgtacgatcatggctttttggtgagaaaaagggtgctaggagcccatatataaaactgcaagctaaactgaataaaataacagaactagatatatcaacaaaaaactaaatcgaaataaatgaagaaagacaattctcacatcaaagatttgtctttttcttttctgaagtgtggagtacaagaatagaattgataattgagttcatcatgcattatttaaaatatatataacaatggagatcgagcacaattgaagaactcatatccattcttactcaaagtgtgtgcaagcatatgagtctaaattaagtaactgcaaaagattcgtcttgtgtgcaagcaaaagagacaagtcttgtgtgtgcaagcaaaatccattggatgatcttgtgtatatttttagcatgctgatcatttgtagcctgctgcatgcacaatgaacaaaacttctgtttttcgatttaacaacatatgaacccattgaatggaagaatctacactaaccagagatgagagatgacttgatgttcggttgagattttgatgaaaaaaaattatgcaggaaatgcgggagagttggagaccatccgaactacatatatattaaccatccagtcatccacttataacatactactatattgaaagtttattaaaaaattcttaatcctaggctagaaattttaatctttgtttacaacatataaattctaatatttaaattaattaaaataataatattaacaagtgagaataaaaaatcattattaatatagttgtttgtcctatttccataaaataaattaaaaaattattcctaattttttcaatattttggatttaactgtgcagtcagaattttaaaattctaacccttacattaaaaatatactaacattaaaaaaaatactaatgtactcttttaattattatatttttaggaaaaagagtatttttgggcaccttaaattttatctcagcttctacaaatagacatattaaattttaattttatcctagttgattcctaaactttatctagataccatgaacttaaatttcgttttaatctttttttttgtgttactatttaaacatggatttgtctatggtgggaggccgttgaatgtctcctctaatttttataatccttgagtttaccgaacatcttatttgagtcaaacatatacaagtgaaaataaaataattaattagaacagtttaagacctacatatgagaaaacaaataccattagaaaaatatcacatgcatatctaaagctaaattaattaatgaccaaagtttagaggagggggaacatgaccaaattaattcatgataaacatatagacttaactgaggatgaatgtggttactaaagtgaattggaggatcaagaaaattcttgaacattcctatgtatgtttcacaatcaattgcttaaaagtatgacatatatatacatagaatagtttctttatattaattttaaaaaaaggaaaaaaaatccacctgaacttttgggcattgaaccaggcaacatagagaaggataagatgccctgtcgaatgaggtttagttgttttaagtgtgattcatgtatatatacttgttctctcatggcctcagtagccatgtaatatattgaacaacttcaacttctttatttaggttctaaatatttgaaaccttaaatttacattaatatcttagtttaccactacttgatttgccctcgttaagatatcttattttggaactagattataattgtctatcaggtatcttagagtcataaaggcacatcccttattttatgtagccattgaactattattggtttgtttgattaattaagcatatttatttttatataaataattgcgtatttagatttccagcggcatatattcatttattttttattatatgttattgccctactaagccaaagatatttcttttaaaaggaattttattcatgtttttttataactaaacaattttttttttcaagacgaaaattttgccatcatttttataaaatttattgcaaggcgttcaaattatgttgagataagtttccaatgattaagatgattaagtcctaactccgacttggcaggtccttgcagaggtggaacacatgtcaaatgataaagcacatgtaaataaagcaatagatcgaccacaaaataaaagctgggacttcacatgtaattaaaacagtgaaccacataataaaagtcataatgtcactcgtgttttaagaataaaaactacattgtaaagttacttaaatgtacattgtttctacattaaatagataaagattatccgcctttataatcaagagccattttgggcatgtttggattccaaataaaattgattttagtctaaaaaattatgataaataattaaaaatgaagaaactttcaaaaattgttttacttgtgacaagtaagatgtggtgacctacctaatcaaacacgcactgttatcatgtatgtacgggtatattatatatatatatatatatatatatatattttaatgtttttaatttttttataataaagtaatttatattaatactttttgaaatttcataaatttattttgctatatgaccgttaatatttatttatatataatatatatacctatttctgaatattttattattattcatttgactttttttgaaaatatatttttatagaatattaattaaatatcaaatttatgtcataaaatatatgaaaaatctatttattcatatatttatattaatattatactgataatattaaatgttatattaatattgtttgtcaaatatactttattcaataatttataaattaatatattcaaagtcaaaaaaataaaatatatatatattaatatacatttaatttttttttttttgtgttcaagctagttttataaagtaattttataaaatatcaattgattataaaaaaatgttttgtcttttgatagtaatttttactcttccaatgtttggtgtcccagaactcttccacaagtgggccttctgggcccaaagccaaggccttttcctcgctcagaaccaccgccaaaatccccacacaccccgctcccatcatcacaatactggaatcatgtttcagtaatggcaaacttaataaggttgattcgattggattatctgagtttgatatttgaaaaaaaaaatcttgatcaaactctatttatcttttcatcgatcttcaaataattagagttcctttcttctaataaatcaaatgattaagacaaacaaatattctttctaaaaatattattgataatttttaatcttgttatccttgattattttattattttttttctttagattgttctattattttttattttaatacctttgctacaaaaagatgtcttgtgtagttatattcaatgagagcaagatgtcgtgtcccacctactgacatacctacacaaacacgcacttctaaaaggaatttgacttggttataaaaagaaatctggaaggaccggacttggaaaaaagtttgtcgatgagttgaagtgagacagggtgagagtgagtgttgcggacaggggcggagataaggggggcgggggctagggtgcaggggcggatccagaaaaaaaattagtgtgtggttggtgcttaaaaataacaagagtgtggtcactgcattcatgaaaattataaatataccgattcacactcactcatctcttatttttcatcttttttattattttttttctatacttttcaatttctccttgtgaaaacatctaagttatttttttattttactttattttattattataaaaaaattacccaaaaatttttaaacatattcttgagaatttaagggggggcactgtccccccaatctatagcctgcgtccgcccatgctagggtgggcaccgcccccctaaaattttattaatataaattttattataatattaaaaattaaaaattaaaaaagtaatttaataataaaaaaggttatatcatatgatataataaaatataatatttttaatattatattaaaaaagataaaatatttttgagattgtattacataagataatataataaaaatctttaagattacataaaatattttttaagattgtattcaaatatagtatataatattttttaatattgtatcaaaaataggataaaatatttttaagattgtattgcataatataaaatatatttaaaattgtattgcataatatgataaagtatttttaagattacattcaaaaattggttaaaatcgtatgcttaaattagtataaatcgaaacatattttgtggtaatcaattcattacgatgataacgaattataagtattgtaagtgattatcaggcaaggtttttaatttcatttgcagtgctgaatcaattcattatgatgaaaatgaatgacaactattataaatgatttttagaataagcttttacttttacattgaagttgctgtataattcaagatgatgaaaaaatggtttgtgaaaataattgtgattgtggcagataatgaggggtgttttggagccaatagtgacaccggatgctttggagaaacagcctcaaccagtgactatgttgtatgagatgtgccaaaagaaggggaagcatgttgatataaaacaatcaagggaaggacatgcaagtgttgctaaggtgtttgttgcctcctcttcttctcaaaaggatcttgcaaagcttgaagctgccaagattggcttgcgtaaactccctcatgtggtgccttccaccgataagtttgccactaacatgaagctcaattttagtgctgatgaaaattataccttgatttccataaattatggacttttggggtgataaggaattggaatgcatcgttcatgataatagatccacgtggaagatgggacaatgactatgtggtcgttagttcctgccactagtttttggttggatgatgttgtttgttgggagtttcattgcctcacttctcatttttcagttgagtacataatataaccttatactatacttgaacacctatcacaggtaaggtaatctaactatgagtttggaatgattaattttgatgcagggttagtttgataatatcatctttaaagtacatattattagaatgtcttgagtaagatgtcatgtcccacctattcaatgagagcaaaatgttatgtcccacctattcaataagagcaagatgtcgtgacccgtctactgacctatctacccaaacacgcaattctaaaaggaatttgacttggttataaaaaaaaatccggaaggaccggacttggaaaaagtgagttgaagtgagacagggtgagagtgagtgttgcggagatggacgtgtatatgcttgaggaagtacagaagataaaaaaatgtaaacatcctaaaaccatgaataatgccctattgttaatcttcaattcacgtaatcaactcacttcaatcttattgattaaaccaaatttttatactaataatatcacttacacgaaggcaactactgaatgtagcatctcttaacacggctggaagacaggttcttaatgcatgacacaataaaaggtgataagaaataaagacacaataaatgtagtcaatatagtttttcgataaaattagtcaccaacaaattagatagatctatgtatgaaaacatggtattaaaaaaatatgttaataaatatacatcaaatatggaaaaaatataacttaaaaaggaaatgaataattgttttattaatgaaataattatcaataataaatataataaaaaataaaaatacatgtgtttgaaatttgtaattttgataaattttaaacatgaatttaattaataaaatattaatttttataagtatacataaaatgtgaaaatataaattaaaaagtaaagaatggttgttttattagtaataaatataaaataaattattaaatatatgtttaaaatttttaattttgaaataaaaagatttaatgttaattgaaaaaataaatattgatacggatagataaggaaattaaaaaaatgactaagaaaaaaaatgatataaaaaaatatgttatgaaatgaaaaaggttgaaggggaaatatttagtgtaaacatttaagaataaaatatataaatttgagccatataaccttaaataattaagattaaaaattaattaatagtcacatgaagattttaatttttaataaattaccttcatttatctttcaacaatgatcatttagatattagctgataatttaaatttgttaggacaaatgataaaacagatccttcaaatattttgatttatgtgaaggggtttagttcatttgattaaacagagtccgtgatttatcataaattttttttatattatcttcaatttttatgaataaaatatatattttgaatgatcctatattaaaagctaaattgattaagggaacgagtcacaattattatggagaacttccatggtccaacattcttttatatttgttttctagtaataattatatataatattgtctgtaatgtggacttagcagttccaatccatgattgagaaatcaacgaatccatttgcaactcctttaaaaataaatattatatgaatgatatttttttctcgaatttcaaatactttgtagagtgctcaaaaggtattttttttaatactttcagtacctaagagattattatcgatatccttttgggagaatgataataaattccaaaacttattttgtcctccactaactaccactatcttttctattggtaatgtagttgacctttggttagatattgatcatgaaacaatattatctattgagaaatttctaactttaaatttttttaaacttataaaattaattcaattttaaaataaaatagaatgtgatgtgtattatatatttaggaagaattcttttaaaacaactaatttctaaatacatctatttcattttacatctattctaaacatatgaatttgttcatccttattgtaagtttatcaaaagaaagagataatttttttttcaaaagatcatatgtgatacacttgttacaaagactagtggtgaaagatttggataatacacataaggtcatagccgtaactaggttcgaactttaatatgtacacgcacacaaactcattacgaagaaatgatataatttcttaaacaaggagatagcaaaacacatttttttaattaattataatttaatgtaacatcttcatactgattttctagttttttttcttattaaatactttttttctgttttgaaatattaaataaatttattatttaaaaattatttggaagactaattaaatatgtcataataaatatatcatttcttataaaatagagaagaaattaataaaaataacagataaaaaacataaataaattaagaagtgattttaatataaataaaaagatattaataatgacatatattaagaggtcgatctatatatatatatatatatatatatatatatatatatatatatatatatatttatatattcttaactcgtcttctttgttcgatataataataatgaaacaacctaaaaaggaaaataaattactatcccacaagcacaagtcaatgtctacttattttttcaatcaaaaaatgcaatcatattattattgtatccaaaaaaaataaaaaaacacattattgaggcaatatattcgacgcgtgctgtaatgctcatgcatagatactcacatacacacacatatatatatatatacacacatatatatatatatatattaggcttttgcttctggctctggtttgttcttggctttgtttccctgcttgtgcttcaacatgaagaagctaatccacgtgaaaacctccaaaccaaatgcgatggtacccaacaaagcaagatttccaatgtatccccacttccatgcatctccaccttccaaaatggtaattcctttgaatatgtttatgaatatgatagccagcaatccataaccaagaaaatgatggtacatattccaatatttccggtaatcatccgtcaccttcggcttcaagcgaaaagccaacatctgaaaaccaaacacatatctttcatcaatgtatatcctaatagagattaattaatgcaattaataagaatgaaattaaatcagtttctttattttttcccccgttaaatctatatatgaataggatttagcgatgtaaatcgtaaatactataaattataattgttggttagaaaattaatagtgggtgactaatttttttaacagataattcagcccttatattattttggtaatataatggtagaactatcgaatattcaataataataaaaattcttatactaaatgcattttagaaagcaaaaaaattaactacatattttaaacttttaaaacagatgtggagcatatattaattaaatattttagagctaaacctaattactaaggaatggatctacaacttaaccaagggtgaaagcacatgcttttgagggatatataatttaaaaaattaattattaaatctaaataggttccttttagtgttttttttctttaaaagtattttttaatctattatgattttctcttttaaaacatagacctttcatcatcatttaaaagtatgcttcttatattaattaattttaaaaaaatattttaattccctttagacctatttatatattaatcccacacgtaccctaaacggactatccatctacaatctcctttatatatctgtataatctatattcgctttattagataattaaatagctaattttttatgatgatatttgatattgtaaaggtacatgatatatatatatatatatatatatatatatatatagaaagaaagaaagaaatattaattaattaattacctggactgtgctaagggtgaaaatgagaatgccatagtttcgatgagtgtggaaggtgtagtatcttgaagaatggccgagacttaacccaatagcccatccagtggtgccaacgagaaaaccagttaattggcaaccaatgtgcaggttaaaccacattggctcccatttgaaaggaaacacccgaaagtaccttgcagttataattccaatcggcaacagtgttccccacccgataatgttcaggactccatgtacctagattaatttcatgcacaaccataagtataaattaaatgtgcctcttcaacacacaggaaagaaattaatcattctcgtatgagactaatcctgttgtttatttcttatttgtgtaacaatgatcacctcgattgtataggtatatttaccagagtgattctattaattagaaaaagaaaaatgtatatcaatctaatacctaattaattagtagttagacatgtgggaagttgaatttgccattcttctataaacagaacaaattcaatattcttgaaaatatctagctatctttaaagtttttttaattttaccagtttcacatgcctaattttcattgaaatactagtgaatctttgaatagttaatggtaacatgttgatccaaattcaattcaaacttctaaaaccaggttcaaatttgataaacaccagacttttttttagcctacattagatcatgatcgaattacactaaaggatataaattttaattcggattcaaaatttaaaggtctccctacattttattgagtgaattcggcctaaccgagtttgagtcatgccattttgccactctttgtgtaatgaacacttaccatacacaaacacttccaaaaagttaatttaccaataaaataaaatataatttggatcaaagacaagtaagattggtaaatttactattgaaatgatgacatatgttcatgatcatttttttttgaaccaggtatacctttgtcgaaagtcaaagaccatgaccatctttacctaagcattattaatcaaagaataataaaaaaaaaatagctctcgcgtaccgatctaagataactccggtactgtccagtgctgcgaccgtttttgtcagtcaagtctatgacctctgtgctgtcgacattccgaagagttgttggatgtttcaggggatgtccatcgtcaatgtcaatcccaacttgccacacatggttcagcttcgtaacgttgtacacatcagaaggaaggaccaatgtagcatacatggtgttcatattagcgaccttttcaactgatttgttgttcacaaacgcgattttcgacggaagaaggctgcaaccgtgtctggtctctttggtgacgttgtatgtgtctactttccacgttccgtcgccatgtttaatggctatgatggctttggttccaatcatctcaggcctttttcccgggttcacaccccacgccatccacccttgtgagttggggagtgtggcacggaacataatttctagttctatggattcattggtgagactgtggtaggaccaagcaaactctgcccccagagtgcgcagtgtcttacaggctgagatgttcttttgttgggctagtttgaggaacgcttcactgcagggttgagcatcgtggccaagggcgaaggagagaaaagacagtactgtcaaaatggttaatggtaaggtgagtgaagatggcatgtttttttgttgtctcttcatgtgtttctttgtgttgggaaaatgtgatgcatagagagatcttatgaaggggttttctttcttctggatggtgtttaatacagtacagctagttgcgtcatgttttttacttgctgggttgctgcagagtcacttttgctctttattagtctctcaaagggattgattagtactggcatacttcccaaagaggataagaatttagaaacttcaaactcacgttcagaccgcaagtgcgtttttgttgatcacacgctttctttttgagaaatagtgtgctaaatttaacaaaggtgctaattaattactaactgtgcgaatcaattgttgcgaaattattttagcttaagtagttttgaatttgagacctgtatgtccagttagttaaatgcttagatagagactttgttgttcattatccggctcaagtatgattacctctagtttctaacaaaaacaattaattactttgcataaacaggtaatattaggggaatgtgaaaagagctgtgctacaggacccggattagagaaatgctttgtttgaactttgaaatttttcggattttctttttattcaggcatctaaaaaataaaatagctattaaaagtggtaacatgtcaaaatccccatgtgtgtgtatatatatatatagtatacatttgatctcagaacaatcgcagctgacacaaacatacgcccgctactgtttttttcttctgtaaatttagaataaaactaccaacatggcattatactaatgtaattatggaatttcttactgctgtcatatatcttcgacttctcactcgtattctttaataagtaattgtaagttttttattagtgtttttttggattatatacttaactaagacaccatttcctctccttatgtataaaaagtatataaatcatagactctgcctatatactaaagggtaaagagagtgtaacaactaacttcaagggattactcgagtaaggtaacacagggtttcacctaacgtgaatcacgtttaataagtcacaagtgagtctacctttagatcctaaaagtgttagccaccattcggaagagagctcgacaactcgtgtattctgctttaaaaaaggataaactaaatttacacaagttggaaaattatgcttacgtgacctgtaggaaattcccttcactttttgctattttacgtaagttctccaaagcaataacaacaaagttgttggtacttagtttgtcgttcttatattcattactttatgacgcagtcacatttgtttcatacttccatcgaaagtttgtgttgcaatacacagaagtaacccattattagtcccagtgaacacattatccatcaattcttaatgaaccatttttcatcaattttactatataaatatttatagaaagatgggtaatatgtaaatgaaatttaccatgaccgtgacaaaaggtaaaaagactaatatatatggcaaaagggagattaggagaggacacttgaggaaccaatggtataacttatgcaaaaattatgaccagaaaactgagaagatgtagtgatggattcaacaataaaatgagcaaatgaaacttatattacaccacctcaatattatgaatctgcactctatcatttattatgttttggtatacattttatcaatttcataagtgcacttgattttttttcttattataatatgaatatgcaattttgtcatacattgtgttttatactatttacaagtatggaatttgcactttattatacatttttatggaaatattatatatcttattggtttgatagtaataaataagtattttattattattaagcagtttaaatatttattaattaccaaaattgttaaaatcatcggaatgtaatttagagacctaaatttaggtcgccaatctggaaaacagatgtcacttttgtcacaatctacaaagtattttcatttaaagtattttaattaattttttcagcaaccagcagaaacggcaactaataatattttcgacaaaagaacctaaataatacaatttaaataacaaattacgaatttgggactgtttcaaaactatttaccaatctggggcagttggtcacgcccagaactgggcatagtcacgcctggtgctgggcgtgaccagtcatgcccagttctgggcgtgacctactcctgacacgtgtcatgcacagatgcagcgatgcgtatataaacttcggacgatcataaattttgactgaaatgtccgattgaggcgaaactggtagccacgcgttcgaaattgagaggagaagcacctggcaagtttcaaaggggacttggtcaaaaaattttcccaaaagaggcctctaagtacctcaaaattgtgatttaatcttcgaagatctaaaattttcttgttttctgcttttttaattattcagtaagttaattgcatgctttttttttattacttctattaatttcgagcatttcgacatatcgtacacctcgatcggatatttctatcaaaagttagaccatttgaaggacatatcgtacgccgttgtaacttttttcgatattctaaatttttatatggttttgtttaatattttttggattttttatataataacctcatttatcccaaagcacattcattcctaacttttccgcactcattccacactttaccacttgttccactcatcccaaagtgcactcaccacacaataatcgaaattgtagcaccccattaattccaaagcgcacttggagcggcgaaacattgcagaactctagaaataggagtggaactacgtgacacaaagtgaatcaaattgaaatgcaaagaattgcattgcgcttacccagagagataaagatggtgaccaacctactcgcacaattgatcattcaccatgaaagatggacgatcctttctaattccctttctcgcttggatgtaaatgttttgaccacactaattttatacaattgtgtcaccgattgacagaaagcctaagtttcggtgtaatttcgatgacaagttagtcgactttgtgcttttgaccggaacaaaaagagaaaaggagaattgtcttctactttttttgaaagagaattatcaaattatgagagaatgaaagagatgatgagagggatgagaataatgtgcttaatggggtagtctcgatataaaaaatgagaagtatcaaaatataatattctatttaaaatgctttctatattaaaaaattatttacaaaaatttagaaaaaatgagaagtatcaaaaataaaaatattcaattttttaaaattccaaaataaacaaaattatatataccaaaaatattatattaaataaaatattgaaaaatccaaaatccaaaaattttgaaaaattttattaaataaaatattttattaaatattagttatatatacaaaatccaaaaaatattaaacaaaatcatataaaatttagaaattatattaaataaaataatatactaaaaattataaataccaaaaattcagaatatattaaataaagtcatataaaattaaaaaaatatactaaataaaacaatattaaaaacaagtaaaaaagatcatatctatgatgaagatgagtctaaaaatactttcaaattaaataaaaataaaaataaatgatattaaatgatattttatgtcaaaaattaaaacacgccaattttgatctttatttcagtcgctaacagtttttccgacaaattattttggtcgcaaacaaaaaaatttaaaaaatcgaattttccgtcactaaatcggtcgcccaattttgggcgtgaccaactgcccaggttggtaaatagttttgaaatagccccaaattcgtaatttgttatttaaattgtattatttaggttcttttgactgatatttatatatcttaatatataaatatgaaattgtaaaaataataataattaatttgatagtcagcttcttctcacactgatcctgcattttccttgtccaagtcactgtaaaaaaacaaaagacaaaaccccgaatccctccctctctctctccctctctcgttgctgaatgctttcatggagttcagacatcgaaattacagtgccgagcttgaatctcacgcgctccctcgcctacgcgccggagctcatcctctctctgctccacctccacctccacctctctcccaggtctttctcgtatcataatttctctcgcaattgttttttcttcttttaaaacaattacgctaccttgcttgatcagtgcttgtgactatgcagaatcggtgttgcattcacggtttcggatgcaccacgaaatatatcagttttttttttattttattgcgtagagttaggattcagttctatcatcctgaaataagaaaacgcctaggattttaatcattcagttaaattaaattctatcgatctttccctgtgtagatacctttatcctgtttgatatagtctaatgattcgatattgttgaaacgagtaatgtgagtgtaattagttctgtaaaatctgatgtaatctggataattattcaaacaatcatagtcatgaattgcatgccagtagtttatgtaacactgcaatagtgcactaagagctgaggaaaggaggggaggtcgggaaccaggaaggatttcgtaagtaactacaatttaggacttactaatttctgttgactcgcgtaatgaaaatatttgttgacttgcttaatgaaaatatatataaaaaactgtggtcgtgtttattaggtggatttgtgacggtaaaattttacatatcttgcgcttttgacagtattcatttatttgttgatatgtttgttttaggtcgatgtcgtagatcgtgggaacactgatttctatgatccactaagaggaactaataataatgcaaatgctgcccctcctgatcatgacaacttgaatgaagctgctgatcatcagccaacaaaggagtggacctctttcaggagattactaacgcagaggtttcctgtctccaaaatggtttctgttgcttcagtaagttttacagtattttctttttctggtttatgtaaatgttaaagatgtactgcatataaaaataaataaaaatattgtggtatctaagatggctaagggcaaatacagtatgctgcatatgatggaagcatgcattgtgatgacactgtagattggctttgaacattcttaattgtcagtagtggtagatcaggttagatcatagatgtgaatttagatactgctggcaagttaagttcaaccagtgtgaatttggacattacctccttctgcaagggttattcattctttctgtgtctttgttttagctggctagggaaaggctggacatttttctgtttggaaaacagtagaactgtctgatactgttttattggtttccatgtgattaaaacatattttaatcggctgcattaacggatatcaatcgttaaacatttttaaggaagaggtgtattatctggcaggagcagacttgggaaagttgtgaatacgtgttgtgcttaaaaataaatattgactaagatatttctaaatattcaaccatttattaatacatctcatatttcaccttaggttccttcattattcttttttccacctctcagctataaagataatgaatcaagcttgggtatgggcattgttgtttatgattttgcattttaagggccctatgctagtcgccagataatactgctcatatgagctaaccttctgttgaaaaaagttcacaaactttgaaatattcttatgaagtgtaagatatagcagttaattactatatactaatatacatctgtaatttctattgtgcaatgttgattggtagaggataggtcttaaagtaagataggtaaataatcccttatattcttaaaccagttttgatcctttatctctaaccctttcagtttttattatatttatctaattatttattctttaaattacagatgcccgatgttttaatgagaagtggaaaatgtatgccaatatcttttacattgtttttccttttgttttatcctttatttatctttacttagttatgtgacctcccaattttcagtacttgagaaatcttcaacaaatatgcacttggaggaattggacgatccacaaaaatttgctgatgagggtgtcaagacgattacttggcaggagtatgtttctcgactacatgaactcaaagatgaaattactcgttcctggcttgctgaagatcgagtgacatccttaaagttatcaataaaggtgaatttttatgtatttaatgatttcttttcaacattatagtttgtatgagtgcaatcaccttttggctttttaaatgaaaaaagagacatttttgttttagttattccatttagctggagagagagatggaaacaattgtgaaggtggggggttgagagggtgtcgagtaaattgttgaaggaatattgagtgggctgattgaagaagctcttcatcagaaaagtgggagagacctgggataatccctttttctgggataatatattttcccctttatcagatagtgtagggattgacggcccttaaaaatggatatgccattttgtattttcttttcctcctgtactttctttactcttcgtaatatttatatgacagaatacaaatgttgtataattttgtttaacaagattttaaaatactagggacttagagagatgggcctacccatttaaaatataactcatttttatacttagtttcggagtgggagtgaaatcatactgatttattttcatttcttgtctaagtttgtcttgattttgattgattatgagggctgaaactgattattctgtttgcaggttgctaagcttctgatggatacgtcagtattcgagttttatcctacactttttgttcttgtcacagatatcatggatatgcttgggaacctggtttggcaacgcataaagcggaaagctgagttttccgaagatggagctttacgctgcaacttagcaggtcctttgtcaatttgaaactcatcacaaaatgttgtttacttccataatctgtagttatataaatattacttattcaggttaagcttgtggattgtctgagggcgctaatagtttttcaacattaaatctttttcatgctaatgttttgaagactaaggattctgtgttttaactgcaaaaaggttctcagtatctcaaacatcagaagccaccaaatatgtttcattttgtatcttgtatcttgtttattggaactaatttgtacatgtcatacaagcttgatgatctgcatgagataaatggacctcctttagaagtcacatcttttttcttaaatgttttatttgaatcttgtagaaaactttcaagcaagggatatttgtgctgatgcaaaagaaacttgctataactggttcaacaaaattggtgctgtgcaagagcttcttccacgcatgtgaagtccttatcctatgccctgtatttaatttattccgtacatgttttttcccctgaagttatttttcttctctctgcttgtgttggttcgagactttctgatgccattttaatgtgatgtgacaactgataagcattttttttttctgtcaaaattgcttgaaaaagttgctacaatatagacatattttcagaaaagtttgaaagattttgtcaataacattttgaattttgacaagctgttgcactaaagattgtttctcactgactggtatttgctgactgtttatctgaaattgtactagttacttggagctggcaatattgccttgctggcggtttttgcttgaccaacctttagacagcctccgacgcttggtaatgatgataagaggattaggagatccagtagcatctgcatattgccgtctttatatggctcactgtgctcagaatctgccttcacacgatataggtatttttgttgatattatatatctatccttagggtgtgtaaaaatgtaaacaagaagcagatgggccccttttaattgttaaaatacgatctgtatgtatttagatatattttggtctaacctttacatatgcaattgtttatcataatgctctaacacccttacgaactgtaatccaagaccttagtgtgaaatattatatactctttggtgtcagtacagtcacaaatactctggtttaaagttcttgtatttcttccataaatttccaaatttaaaagttgtttagaatgtgaaaagtcggctggttaacacattattgtaccagttattcagataaaacagaatcaatgaatctagattattgcttcatactctttcctatatgaaattttgtgctctatagcagtgcttagttgcctctgattaattttctcttgctccttttctgaaatgggatgcaaaggtcactgactttgctcattctgaatttaatatatccgattgctgttatatacttctttctcatgtttattttcataaaacttatttcataaattgtgcaactggaacaggctatcttgttacatgtgtcaatgacatcagagttgttttgatgcaaatcttgtcagccaatgaaagaactcagaaaaatgttaaactcaacaaaaaattgcaagtcagtctgatggaaccaacaattgagtatattatgaagtgtatatttactgggttgtctcaggtatgtgatgaagtttctcttcaaaaatatacttgttttggatgtattatatatgatcatatttccatatatcttgttatacaaaagtgtataattgaaattttattgattagtatgtttgctcttctattttgaattttccatgagcatttcaagggagtggaattgcaggttgaaatttcatgaaacaggtgtatgcacatataattagctaaatggttggggttcttctcattattataatgaaaactcaattcttatatcttaatcttcatgaagaattattgtcgtcgttatcttttcaaaaactggacagtaggaaaaagaaagtcagtttgctaatgttttccctgcttttctcccctctatatcctatgttttatgctgatctaagtatgtctaactgtgctaaagagacaagtcaatgaagttttatcagagtttggattgatgaagaatcaacaggatttggggagtgtttcaatcattcttcatcatttactgaaggaactccctatagaagtagttagttctaatgtcgtgcagatccttcatctcattgaatttagcaaggataattcctttgatcaggtatacttttgcaatttctatcatagctggatacttcttgtacacattataaagtatttaccattttaccttattatagaggcatcttcgtttaagtttttcccatttgcggttttaatgttcttcttttttgtaatacagcatatgaattacagattgcttggattcaggctgtacgaaagaaaatcctctgttgatattgtcaatgctgtgttagataaagttattcaggtatttgtaaaattctagtccatcttgcatcctttcagagttacattattaggttctttgcaattgcatatattcttcttaaatcttcatctcttcatccatctacaccttgggggaaattgtgtattttctttgttgtttcctctcgtggtaaggtgataattgagggttgattctagccttcgatgtaattaattgaaagctaaacaatcatatactcttccccttagcatattataaataatatataccttgacttgtttatacataaatctccccgattttaatttttaacataccagtaatccctcttatttatatcaagatattttttttggtaatttatccaacatctatgctctccactcctggtcaatttgagtatatgataatttttacctctataaaaaatgtgtgcgatttagtatggacttcatttgtaagcatgttttcaactgtcagtatttccttcaggtatttcatttgttctctaacttggctgcaactttaggttattgctctgtatgatagccttgacaaatacctgaaggttgtagatgcttatactgatcttattcttcagaatcagatggtaagttcaagtgagtgagtagaatcagactgttattagttctccatgtcttctgaaaaaggtttcttatgccattatgtatcttctttgttgggtcacttgggtgcactaaattgttgaccatttacatggtatagatgattttggctgaaatttatgcatttgtagtcatcatctttttatgtctatgactgttaaaatattaaatgctaaggtttagatattttttaactgacaatattgcttaaggaacagtggcactaattattcttgtaaagctgtgataaacaggtgttaaatgttaccaagttaccatggcactgaaatttctatctgcttaaggcattggttttatggtgcacgtttgattaatttagtgagctcaataggattcatgttctaagctacacaactttcttttctggctatctatgcaattttaaatctacatcaatattaaaacttcttcaaaggttaagctaggctttaatgcagttcttatccttttgttgctaatttgataatcacagttgattgatattctataatcacatcctttcttctcacaataaattcttttaataaaattaaattaaaaaaagagatacaaaaggaagtaggagtaattgtaaatcttcagcaaggagaggtttgaggtttgaaactctttaggagcaactaatgcttgtcttgactaggcagttaacattatattacccaaatgttttctacaaggccaatgtttggcatttgtgtcgtcatcatctagatctacgcattatatcgacatattatagttttgtaggttgagtgggtgtgctggcaagctttgttgcttcccagtaactcccatttgctaaatctcaggctttgaactttttaatttacaacttgcttgattccaatctcctagagattgaacgtgctccttctgaatgaagcttgatgtccgatattggaacaaattaatggcaaagtgtttttagcaagaaggtagtgaatttgattccttagtgctgaatgaattaccaataatacttgtcttgattaaatagtcaatagggtaagggtactgtgaactgaaatgataaggaagctaagtacaagccaatcccccaaaagtaacaagagatctataactaaaaattctggaactaagtttctaagcttttttgtgcaaggacaatagcctatcctcctttctttgcattctttctttctatctattggtatgttctttaagtagacgatcatcagtcaaacatatatatgacaatttaaagaaattccatagaaaatattgagatttaaactctggtccttgatggattaattgttatccaattacaaagtttagttgcaaattgatatacctgttactttcaaatgactagaataatatttaatattttcttttgtaatctttcctctaaatacaattgtttatgccaggataaccatttgaaaatcattttggaaggcatttcaaagcgtacttggaataaaggagttacagaggatgaaatgtcgagcttgcaatctcttgtggtgaagcttctgtctcattttaagcatctggaagatgtgttttctctggtatgttcctaatcatatcttgttgtacttgatcatctttctttttacatctttctttatcattcattcttcaatacatgtgctataaatactagtggtgatttgggtttttgttgatattattttgtaggatcattttcctgaaatcttagatgtaatgtatggcaagtcacaggatgttgtctttttgcatatccttaatatggcgacaaggtaccatttatcacaaacattttgttttactctactcctttcattccatatcacccttattgacactcccatgtgacataccttggttctctagtcttagaattttgggtttgagcctaactaagtcttacaaaaccggctagtaaggtgagggtttccctccacttatttacattaacttgtccatatcactagtcgatgtgggactaaaccatcacccttgaggctgtaattcaggcagccctcaaagaggctgcaactgagatgggctaggggtgacctcaattaaggtagttttccaacatctagtttgtatatgatatgtatgttctttgagagtttgaggaataagaatttttaacttttgttacttaattgagttgattgatatttgtgtacaaactctgtcatgaacaactaccataaatgattttatattacatgtctaatatgcctccacatgccagaggctgtggggcttgaagtgtgaacattgcaagttcacttatcttgtgctgaaattcatttatttatttattagaattagtgtgacaaggatcaacttctagaccgcttggtcattagaggctttgatatcatatgatgaaccaactatacccaaaatttaagctattaggtgaagaaatgtgaatgattttatattaaaatttaacaaattcctttacttctgtggcaattaaaaaaaacattttcttttgagttgtaaggccgtactgttgaataaatagagaggcagaggaggggagaggtgcaaaatagtaagagatgtgcaaaagagagggaaagtgatgtatgtcagaaagggggagagagagagggggaaaaggagaaaagaggcagaaaagaaagaggcgcgaaagagagataggagagagagggagggaggtgttgaagagaaagggagagacagagagaggtgtggaagagagagtggtgtcaaagagaaaaaaggagagagaggcatagatacgagagagggaggaaaagggagagaggtgcaacagtgatagagtgtgcactagagttttggggtgagagttttcaattttttttcattttgaaatcccttcattttaccagaaaaatatcctcaattttaaaattctttggatttgatatccaaacaagtcattttggcacaggatatttgaaatccactcaaaagttgagttcttctctccaagctcaccatccaaaattaggctgcattaaatacaccaaaattcctactaacattgtacaatttcatataaccattcatttctttcctctcctaaatcccctgtataggctgtacttgcacataaaagctgctgtaaagtgactgcactaacgtagataattgttatcacagaacttatacagacttacacttccaagtctactatcttagatctaattttgaaaaatacatcttatttgaacttctattttcttaaatcatgaactgctataaggctaagacattgagtcagctttgttaacattaaataaggtcattgaaacccaattaaaattgatgggatttttttctttcaaaaaagttccatgggaaattacatccagatcctgaatcaaaacttaaccatgtatccacaccacagagtttacttttgcattttcaaatgtttttgtttcataatatgctagctgcctgcaacatactcttgattctatctttctgattggtgagtataatttattaagtattcatttcattaccatggaattatctgttattatttgttaagcaggaatggtcgcattagtgatccgacgagcatacagttgctttttgaaatttctctgacactacataataatatagagattatgaacgtaaaagatgatgatggccaagtggcatgttcaatagctcgctttgtgcacatggtaacctgttccttttgatattatttgtctctatggtcactttctttagttgtggtaatgtttttgccatgattatgaatgttgactctaaattgccttattcactaggtagaatatggaacagagatggaaagccatttagcatttctggttgattgccgaggagcttttggtagattaaatgagcttaaggtttgtctttgtttttcttaaaagttgtggcaaaatgccctggtataagtgataaagttgtcatgctttcttgcaggaaactcttgttcactctagcaattctttagcaattcaagctttgaaatgtgataagaaacatctgagttttgtcaaatcctgtgtcacatttagtgaagtcacaataccttctatttatgctcacaggcagtttgatctttttctagaaactgcagaggtaggtatgtcagttcttgacacatcaaagttgtgtttatttttgctacttttatatttttcatggattcatagtttgaatttttcaggttgcattcttagggggcttggtttctcattcagatggattgattgattcagcgatcagctgtttgcataccttagacataattgatggttagttgatatgtaaaacctgtaaatttgttgctgatgcattgtgaaagtactaagaaccaatacttgaaattgaatccttgtcatttgttacttgtggcatgtctattttgtgaaatctattcaatgctaattttctatgtgctatgatgaaacggtagtggttaaaaggttttgagaacaattatcacaattcacaaccaaaacttgttcatgttgtccaaactataaattgttttatattttttagtgactcagttcagtcaattgtgttgaagaaagcccaataatttgggcattttttcttcttcatttttatccccttttttcaaatatctaatgatttgaaggcatttatgaaccttgtaaatcttttttttctcttctatcccctttgttgagtatctaatgatttgaatacaataatttgagcatcttttttatttttttattttctcttttatcctcttcgtcgaatatcttatgatttgaagccatttatgaacttcgtatatctttcaaattcctaaaacccaacaaggattggggcttcttataacatagagcttaaaagctaacatggaaattgttatattatacagttaagtctccaataagatgttgatgtagaacctatatacatgcatggtctataataatgcaatgctaaatgatccgtaggtgcaacttgtgaaaatattttccatttcacttcatttattgattaacccagtcagaaactagcaatccaatatatatttatagttaactgaaaatgatgtatcagagctaaaataggtagatccttggttaaattagttttatgcttaatcaatcaatatacgaactgaaatggaaattttttggagtgccaaactttagggtcattttccctatattattgttacccaaggcttctaatgcgtaaaagttagaacttaaaaaggaaatgtggttaaacaacactaatctcttcttgaatacaagtatcctagcaatagttcttagaaataactaatacaaaattggatgctacaatatgttaaagacacctgccatatttttgcgaggggtttttattgagcatcattctctttggtcttttggttgcttgtatcagcatttttttgttcttaatgtatttaaaatacattaattgtgccaccatggctttctaaaaaatgacttttgtctgtactctagatagcattcttataatataattgactgttgatttgcttgattttgtaggcttccgaactccaactgatgttgaaggactagtttcatctattagaaagctatgtggcttcttaattatggttccaggttgtaaatattgtttcagctttgcacattaatatacatagacacttcaaaatctctctttctgggatgtatttactatgatttgtatagaaatatataggtactaggttagagatctagttcctttttacctcttccttgaatgcatatatttactatgattttcttcaactttattgaaggtactcttaatctaccagtcacctatttcccaaatagcttatttagattgatcagctcccgatcttggtaagttttctttgggatatatcacaatcgaagcttcttgccccccagaatacttcccttattgttttagtctctcttctcccttcgtgcatcttgttcgatgaatgaattgaaaacccttgcaggtttgaaccaaaaatgaggacacaaattttttctgctatcatattattattgacaactttatcacaaaagagactgccatatcatgcaaatgcacaggtataagtggtatagctttgcatttcctcttttcaattgcattaatggaataaagatgacatatctactctttcactccaaaatggacaaaacatattgaagttgaagagtatttagagaagtcttgcttattgttttgtgtccaagtagtggatgtaagtgtcatttagtggtcatagctccagtataagtaaaggtctagggttaagctaatgtagtataattattctgagcctgttagtgaatctaatttgccttccctttactttgcactgactataacaagtgtaaggtttacggttttgtaaatcaaggtgttcctgacatgttatggtttatggtttttgtatcttaattctcaaaacaatatatttttttcctttccagattccaggcaatgacatgttatactatgaggattcatcgtacaaccaagagcttgtttctttgtctaaacttgttcttgaaaacctgcttagtgccgttcaacaagaaccttcccaggtatcatcattttggctgaattaatagtgtttgatttatttaaccaattataataatactgatttattataacaaaataaaggctgctcgaggaattatggcacttgaagcttgcaattgcattgcatcatctttcatggtaagctgctctgtagttgttttgaacttagttctcaccatcattgacgtggggagaaagtacaaaggaaaaaaagaggactcagattacaatttataaattcttgaaaaacattacaaaactatttccaatttaggcatcctaccctggcaaatgggtatttaaatcaacaggcagttaacccattaactggtttgtagtgtgtctgtatgtatatatatggtctctgccccggcatccccatgagattaatcccattcatggtaattatttaatatttctttaactataaacagaaatttatgaataaacattgttcactatacctatataatatagtttggagcattttgttataaaaggtaggcaaatgaaatgtccttgttcctgtcagaaaccgattcagtatataattataaaggaaaggatgaatttttattgatgaaccctaaatcacgattgctgtgccaatgtggtagcagcctttggctaggttttgaagatacaaaacgaactatttccctggatattcaagattcaaattatcctttctcaaatgataagatgatttctctcaacctcccctctttatttattatttataggcaatatgccttttttgtttcactatcgcggccctggtagcccacccaactaacctaccccactccctcactaatagacacctaactaactaattgaaatacgtgtttgcttcatttctcaggttcaacaaaattgttctgtttcacccttgtatggccttatgggtgaaatatatcttatttaaggatggcctgacatgcatctatgcattccacaacagtgatcactttctcgatacatttgttatcaataaatggtaacaggaatcaatcattttcaaaactcttaaaattcataagggccaaaacttataattttttagggattaaaatctaattttgtcatatttgttggattaacaaacatattaaacctatctttaaatcctaatgattgaatggaacagaaaaaggaagtcagaatatgcgttttcttatgagtccccatgataatgttctgttgtaattcgtaacattttcttgtttgaattattcatttttagcatagccttacctagtattatgttaggggatgaatccttgttgaaagttatcatactctgttgtaacttgtaaccacaaattccaaatgaatttggttgcttggaacttgcagagttgtatctgaatcatgtgcagattctacttcagttttctaataatggtttctttcttgattgttgacagctaaacaatgagttattgtctgcttgccttacactggtcgaaactgccaagtcatgtttgagtgccaaagacagatacctccagtcaaccattcaactattaaacaagcaatcgccaacttctgtagggactatggtgtctacttttgtatgatttgtgttcatctatttatttttctctgttttttttttcctttgaaaatgttctttctccgtgtgggtaaggaacgaggttttctctttccctccctcttatttctctttattttgaacgagggggcttatttgttgcaaatttattatttctttttctttcctctaggaatcaaatgtattacttctaaatatcgtgaacgaactaaaaacggggcataaagttaaattttctacagtattctattgaccttagtattttcctcctaactgaatagttaacctaattttggctagcataactgcatctaacaaaattatgacggattgagttcactttattaattctccaaagtacctttaattcagtgaaaacattcagttactgatgacgatccccttttgaaagcatacagttcttgttgttccaaatacacgaaacaaaagtaccatgtgaaaaacatggcgactttttgcatggggtacccctaatggctatacatgatgcgaatactacttttagaatgggttgcacggtgcgtgtatattacaccgttagatcttggaataaatgagactactgtagaactatctacattagatttttctctattttgcgaaatacccttcttcttcggtcccctcctcttccctccatcactccatcatcattcttccgcacacccacataaataaataaaaccaccatccataaacgaaaattaaactcagatcttcggattcaaatctataataacatgtattttcttatgaatatagcgtacaacattcagatctaagaaaccaatacaaaaaaatcaaagaaaccaatacaaaaaatcagcaacaatacataaaacaagtatttacgataaatgagaatcaaaacttaaatactaaataaaataaaataaaagcgtcagatctgccgctgaaatcgcaccgaaaaaactccaaagttgtggtcagtggcaacgcaagatcttccatggtcatcaccgcctcaccactctcttctctttaaatcttaacggtaaaaaaaaaaaaaaaaaaaatcacaaggtacaaccattttaaaacattcttgttcgcaccgtgcgtaccatgtagagggtatgcacgttagccagagtcgagaaacattcaaggtcttgccatacttggatttctgatgtaaatcacattttgtccgatcaaggcagagactactaagtaagcaatccaataatcaatcagattgttgcatcactccttgagcttcaaagtgtggatcaaaagaattcatagtttctttctttttatcagaccaatttgtatttattgttcgacattaaagatctagcgtcacattatcgtagtagaacttttgtttggatgaatatggtagttagtcgtttgattttggctagaatttgctgattagtcactcagacgatagatttctattgaagctaatgtcgaagttttgaggcttttggttataagaattactcgatgtgcaatggagttctcgttgaaaagctttgatactatctaaataagcagaacgaactcaaaatgaggtatatttgctcaattagagatggcaatgggggtggcgctgctcggggacagatttgcctctccgttctcgcaaaatgcgatacgcattcggaaataaaagagggtttaaatttttcatacattctcattggattttatcatcgtagataacctgttatactcttttttataattttaatttacatatatttataaataaattatatattaaaattttaattatgttttaattcaaataatatacaaatataataaataacaaataaataaaagataaaaataaagaattcaattatgtttttatttaattattaagttaattgatttatatttttgaaaattataacaataaaatctttataaaattagtaatattatgtgtgtatatatatatatatatatatatatatgttgtgacaaaaaattataaaaaaaatgtaatagtgacatgtacaatataatttgatattatttttactttaaaaaattgaataatacgtaattaaagtagatattcttcatcaaagtcaagataagttctagagaatactcacaagtatgaggttatttatcatgtctactcaatagtgattaagtgcacaccattttgtaatctgactaatatagtaatattactaattttaaataattttttatggttttatctttgatttgtatctgggaaacatgatttctggaaaagtaaatttcataaaataatgatttgtgtgaatgtgtatttgattagtcttaatatattttttgataattaaatatttatgtaaaatatgtagttaaaactttttttacattcaaaaaattagattcctgtcccccaccttaagaatgtgttttgacatgaaagtgaactaaattaattcttaaaaatcataattttctgacaatttttttttattaatcgtatcctaaacataaaaatcataatttcctactttataatttatgaaaaaatcgtttaccaaacttgtctcgcgctaaataaattggcatggtagtagtgtggacaaaactcaacatcttgctggcagtggaactacttaagtagttttggttatagttgacctctgaaaactctatctgactgtagaattctcgaattctgatatttgattaaaactaactacatcagtttcatagtcagaatagctacattaagagagactaaactaattattagaattgaacttaaatatactgatgagagtgtaaaagttttatacacattgtatttttgaagcagaatatacacattgttattaattattaattatttcagaaagccgacaatcaactcatttacgaatgggccaaaggcccaaagctccaactaaaacccgggccctgtgcatagatgtagccggtagggcacattccgacgggtcattacccaaaattcgttcattcataattttcaaatcccatagcgacaaacaaataatcatcatcgttttcatattttagagagagagagagagattgtgcgttttgataatcaaccaagttgcagaagcgatggatctggaggtggcagggcggcacgcgatgctgttcgacgacgacggcatggcggcgttcgtgaactcagcggaagctctggttgaatggaactctctttccatcgaccgctacgatgtccgccaccttctctccgctcccctccccccgcgcctcaagcgccgccctcctccgcccgaacccgatctcgatcaccagcgctatctcgatctcccttcctcttctcccgacgacgaacagccacaaggtaacctcatacacaattcctctatactttttactttctagttccttccctttcttagggttgattttccccaaatatgtttctgttttatttggaactctgttggttgttgtgttttatgttttcaccacaagaagctatgggagctttggttagtgattttgttttgatgaggttttatgttcttccctggagagaagttgggaagttttgttagtgttcaaggttcatcctaattttatataggccacggtgagaaaagtcaatcaaatggaagttgttctgtttaattaggttcgaggaagtccttaaactttgggagtgaaactatgggttttgattgagctcagcggtttaagataaagcttttgttgcttctttgtgggctttagctagaatgtttccttgcatgatgaaaggttttgagaacatattctggtttaacaaaaaagcttgccttcgtaatctttatttttgtaacaatgagggctttgatattttgagttgtgtgtgacatattgtgatgtgtgtatagagcaagggctattaataatcagtcacgggtaattctctaaggtttgtctatcaagtttgttcaatttgttctcatcattttgacacattgatatatttggttagacatcacatttagttggggcaactagttgatcgtgggttctttgttggctaatggctagcaaaacacatgttttttccgtgcatgttggaacaatccaacttccacttgagtctatgtcagagtgtttttttttttttccggcaacaacaagctccacatttgcaggttggaatttaatttgctacggttcccgtgtctgaatacaagtaaggatgttttcacctggcttcaatttaagtttggcgttgtgttgcaactactgtttttgctggatggttttgttgttattgagaattatattatatttgattctgatgaagaatatcacctctttgtgtttagattatggttcagatccagtgagttcaactggctttcatgctgtcgccttttcatatggaaattctaatgtgtccatggagacaaaggacaatgatactgagtctagttttcatcctaaattcccagtaccagaaagcctactcaataacctggtgagtaacctctgtcttaatatatactttaaattgtgtggttttccgatgttactaatttaattgacctttcattgtttaaccaatgtgattaggtgataattgtctagggtacatatgttattctaaggcttacaatgtctaagtttcagatgctcggagcataaacggagttcttgtgactcaaggtagccattcacaggcaccttggttccttttgatgtcatgagaaggggccgtgcaggtgggattaggatgatagaaatttgttgattccttacctcttgagagcaaatggaatgatacatgtcttcataaagttctgtttcttgatctttatcattatcaaagtatttgtgaggttgtcttgtgtttgtttagtaggatacaagtgtctaaatattctgcttggctagaccctttttaagtttatacttgtactaattttggaattcacatttattgatgacgaaacatttttttgtttgtttgtttttcttttccagcctccaaatgagaaagtacatcagattatttcaaggactgcaacatttgtcagcaaacatggaagccagtcagaaatcattctgagggtgaaacaaggagacaatccaacttttggattcctgatgcccgatcatcatcttcatgcatattttaggtttctcgttgatcaccaagaacttctgaaagttgacaaagatgatggaagctcaactgaggacatgaataggactcaggggcttgatcaaacaggtggtgcattgtcgttgcttggatctgtctatggatccggagaggacgaggatggtacaactgagaatacttgtgatgttgagaaaaaagaatgtgagggagctgttgatgctgctagtaattatacttctccaggaatagatcaggcagaatcttattcagatgtggccaagaaggatggaagcatttctaaaaatccaataccctctttgaaagaaaaagttcctgtcataaagcggaatcattctattggtactgttaagactgtaaccacagctagagctaaaggtgatggcttggattcagtatgtaatgcacagaacaagtcgcaaacttctgtgacgagtactgctaagattgaactcccagttgttgaacctccatctgatttaaagagagctatagagaagatagttgagttcatcttaaaaaatggaaaacaatttgaggctgttctggcagaacaggatcgacctcatggaaggttcccatttcttctgccatctaatcgatatcatacttactatctgaaagttcttcaaactgctgaagaggtgtgtttctcagaactattaaaatttagcttatttttaattttcaattaatgtgattcaaattgttcccttctaccctactcttccctcccctctaaagcaaaaacataatttaattgactgatattatcacctgtaaacttatctgcagtaccctaatgttggttattctaattaatcattggtcatgtttgtatttctgtctgttatgcaaatttgtatgcatgtggcatgtatgctttatatagctataatgccttgccatgtagttgtgataaattatgaatttttgaagcagtcatggttatttttattcaacttcgcctttcaaagattttccttctccatggaattcaaattttggtaattattttatttgggttctggagggattttttgcaccttgtgtattctatgaattatttgggactgattaaggtagtgttaattttgactttgagctgctacttactgatcttcctaattgtttgtagtctaagttactaggcaagggccaccagaagcacaatccagcaggtcgtacaggggacaataaagctgctgtacatgaagatagtgacaatctttcacatggatctatggcttctgatctaccatatgacatggacagaaaagaaaagttcaagatgattattggcaagtctaagaaggatgatcaaggtccaattccaaaagaccaagctcaaaacacaattagtatggatgcagcagcaactgcagctattcttcaggctgccactaggggtattaaaactccccatttggaagttcttaccaagacatcaagtggtagtggtcaaggccttggaagtgatggtgggtatttgtccagctctgggactggtagtctgtattcatttcaaccacaaggttttgttgaaagtcaaaacctgaatgtaaaggcaaaggctagtgcttctgcccctgttgccaaggctattgcagaaaaagtagctatggcagcagcaggtgaggcggactcctctgaagttcacatgactaaagagcaaaagcttaaggcagagagactgaaacgagcaaagatgtttgcagccatgcttaaaagtggtgttggagcaagtgaactgccacgagctttatcagttgagccaccaggctctggagtttcaggttcagatgctgagactgggaatcttgtgggtaaagaaagggaaggaagttctgttccatttgatgttgataattcagataaaagtcaaaagtctgaggagaatctttctattgataataattcagataaaagtcagaaatctaaggagaaacttactgttgatgataatgaacgccggtcaaaaagaaagtaccgctcaagatctagtagacatgaagaggaggaagaagaagaaaacaaagaagatagaagggatcataaacgatccaggaaaaaacatcgctcacatcgtacttcacaccacaatcgggacaggcataagcacaagagaagacattcctcctccaaagacaagtattcttacagggggaccaagcacgatagctcctcttctgatgatgaacatcatcgcccaaggcatcgtcgtcataaatatgatagctcctctgatgaaaagcaccactcttccaaacaacgacatagggatgagaacttgtcagaccatgagcatagacattcttgccattctaatgaagattatagttcatctgatggtgagcataggcatcgaagcagaagcagaagtgtagggcataagagcagatctcatgctgaaagagaaagagagctggaggagggggagataattatgaaatcggaaaagtcagtagtaagtggtgaagttggacgtgctagtagggaggcttctgagggattatctaatccaagggcaccatctcaatcacctgaaataactgatgtttctgatgagcttagagccaaaattcgagccatgttgatggctaacttgtaaaagctatatggggctgacaataattgtattgctttaacttctttggtaatattatagtccattgctccaacggaaacatcctgaatttttcgtaataataaaataataatatttagagtagtctactaaaattaaaagaaacggttaggtaaaaattaataataaacgtgcaaaatttgattttttttcttttgcaaattacgataacgtataaattttatgattaagatggtatggtaaaagtaagtattgaaacaagtaatataactacaggaaaatatattgattataaattagttaaattggaatattaaaaccatataatgaactataatatttttagtaaatatgtttttagcattcctatttatgttcaaatcactaaaataaaacaaatatataccagtacttggttgatctctttcttctgttttgtcttttctatttttattttatcaatcaaatacaacatcaaggaattatgtaatgtcggacatatttcatgtggcaaaaaaattgatatatttcaaacaaaatattataatctcgtgagtaaattattaggacttttggaagaaaaaaaaaactaaaattctggaaattttggacagtttaaaatttaagacctagactcacttttaaaatatttatcttcttattttactcaaagtattatcatatattataacttaataaatagttggttatttggcgggcattaaactatgcaaacgacatcgtatgggaacactatataaatcctccgttgtccagaaccctagctttacttttactctcactcacatttgtagcttcacaacgccgccgcgcacatcgcagtcctcactctcccggaaaaccctcatcagcgcatcgaatatttgcaatctccaatagttctctttatctcttcaccataaaaatgtgtgaatccgtggaaactaaagaaaggcccaaattcaaagatattagacgctatttctgcgagtactgcggcatctgcaggtccaaaaaaacccttatcacctcccacatcaattcgcaccacaaggtacccttctttctaattctgcaaaatcaaaccgtttataagcaaccctgattgaattagatcattatgtagggttatgtgtggttttgttgtttacttttgatgtgtttttaggaagaggatgaaaaagcaagagctgaaagaggtcccgaaggaaaggcttcgaaatccaacacttgcgaggaatgtggtgccactttcaaaaaacaagcccatttgttgcagcacatgctaagtcattcaaatgaggtatttggactcttcaattaaatattgttattatttaagaaaaaacatagattcagttaagtgaaactcttaaactaagtatgttttatagaccgtcgtgttccttgagaaacattttatttgtggaagacaggcttggtgttgtgaattgattgtgttacttgttgtatatagactgaaaatacatattttgcaggatagtaatctataagattctaaaatcattggaaaattatggattaatagtgtgaagcattggatcccagaaaaagaactccaaaatgcacgaggcagcgtatatgaacttgatggattagtatcaggtagggagacctcctgtgaagctccatcaaggatgcctcggtcacgctctgttcgaaattgaggttggcagtttgtttatttgtgttttgttcttgtcagagcatcatgatacctttatgtgtgtaagtttctggatttaacagtattttccaatggttacagaggccatttgtgtgtcctgtcgatgattgtcaggcaagttacagaaggaaggaccacctgattcggcaccttcttcagcatgaaggaaagacttttaagtgccctgttgagaattgcaacagtgagttctctttgcaaagcaatatgaaaagacacattgaggagattcatgacaacagttctacctctactagtgacaaaagtcataaacagcatacatgtcccgagattgggtgtggaaaggtttttagatatgcatcacagctacaaaaacatgaagattctcatggtaggttttgttccttttgtaattctttgagttagttaaatttccatgggatgtttgtaaggttcttgtttatttagattagtgaaagatgttgggtgcaattttgaagaaagcctttattctgcagttaagttggagtcagtagatgtggtgtgcttagagcctagttgcatgaaacatttcgctaatgtccagtgccttcaagcccatgtgaaatcctcccatcaatatatgacctgtgacatttgtgggactaagcaactgaagaagaatattaagcgtcaccttcgatcacatgaagtcgaaggcagttcatcagagacctttcaatgtgagtttaagggttgcagctgcacattctcaagagtaagactcctcattcttaaatctaatcagagtatactataattgagttctctgtttggttacaagttgaactttcttttaatttgttcatggttttatgtcaacagaaatctaatcttgataagcataagaaggctgtgcactttaatgaaaggccttttgtttgtggttttcctgattgtggcatgagatttgcttacaaacatgtacgagataatcacgaaaaaacttctaaacatgtttttacccttgtaagttcttttccccttctattccctttgtgcaaaaggttttcttataagtgatattgtcatatagtcatgccttttcattgacttgctcataattttccttgcttcagggggattttgaagaagctgatgaagagttcaggtcaaggcccaggggaggaaggaagagaacatgtcccactgttgaaatgttaattaggaagagggttaccccacctagtcaattggagcattggttatatatgcaggatggtcagtagagtgcatttagtattgtgtgctcctaaatatacaagtaggcataatgtaaatttaatatgttgacataatataattatgtacatttaggattagtaattagtgttaacagagatatatagtatttatttaggagaataacgtgtagtaatgatgtatgcttatatatgacagattcaatagtgtagcgaatctatcaactgtcgtaccaatttgcaatttaaacaattacttgtttataatctggtttggaaggtgatgtatgctctcatcggcatttgctttattggctgtttgaattggttgaaggatatgaaaagcaaaggaacataatggaataagagttttttattttatttagaaattttatggtaaacgaaacacttcttattttatacacaaattatgttttttgaattctggcttaatgtcctgtagtttgtacaaatacttttgataagttaaaagcgtactattaattaaaagaacccttaacgttaagcataaaaagaaaaggcgtgttataaaaaatgccacttaactggcaaccaaaattatctattcccttgtttaataatatttaactccttggtttgcatttttttacatggttgactttaatgtattgtttcaaaataataattttttttctttctaaatcactattaacgttttgtaacagctgttagattttttttataaaataaaacaactctacccaataaagataacaatatatggttggaaaagtcaacgatggacatcttttgttatggaatatggatggtccttactcagttactgtaatgaaaatatcaattgtcttgacaaggcgataaacattacacttagttgaggatctttgagttaaagtgtcctctagagagttgaaacttaaaacatgtaaaataaaaaataatgttgaatttcaatggattgacccattatttttcccatttttttatagaagattttatttatttatttatttttgttattaataattatacatatacacttttattattttatccaagagtgctcagagatagatcggtccaatctaaataaaactgaaaaagcaaaactaataaatcgaataaactaaaaattgaacaaattaaaaacgaaaaaactaatttttttattgaattaaaccagatttcagttttggttttcaatgttgatgcaatccaaactaaacttttatatatttataaaattatcatataatttacacttatttatgaaaaaatatatttaactaagatatataatgacttatagttgaacgacattttaagttattttttgaaaaatcattttttattatgtttaatattttttatcatttatttaatagtttatttatagaaaagtaaagtaagactacaactgaaaaaaaattcaatccaaagcactctagactgtattaaactggatttaagatttaaattaaaccaattaaatgaaaaattaagaaaactgaagctattaaactaaattatttttctcttcaaaattattttaattcaatccatgaatatctctaattttatggtgtggttgtttatttttctttcatgtgatttaaattcataatacatgagtaaaaaatttctacacacaaatatatatttcattgttataaatattattttaaaaaataaaataaaataaattattcaattcatttatatatatatatatatatataattgttaatctttaaatggtaaattacatatagtggaacatttcaagccctagtaaatagtaattagtctaagtcaagagtctctctcattgccattcatatggtttctcctttagaaatcactcacgtgggcatcttacctcagttctgaaatcactactgcatcttggtatatattctcacacataatatttggttttagtcaaaacccattttttgttgccgactcccttgcatctatctctgacatctaccccttctcactcctttccttcaccctttaaataatttgtagacacaactacgtgagtcctttttgatactcatgcaaaaactttcttgctccccaagcacactacgtaacataatagggagtgtatatatatatacatatacatatacatataatcaacatggaacccacttggaatgatcccattgtgaacggtagtaattcttctgatccagtcatgtcgtttagaaggacaccacttgtcatggatgagcttgattttgctcagaagagaaaggagagtgaagatgatgatattgatgatgatcatcaaagtgtggaggaccttcatgttgatgtatgtactatatatgtagccaaactcacatttaaatatttccttagatttaataattgtaattttaccttaattatatatatgggcacctaattatgttcttgttgtgttaatttatagaccagctcagatcttcttacgaagaatgatactggtgtcaatagatcaacgaaagaagatgcggcattggaaactatggacgataagagctacgaggtaccctaattggttgttgtgtctaggtatatatgttatatatgtttgatttatatttatcaaaaaggtagcacgtttaagatgaatatatagtaattaatattaatttattcctatgggtatagtttgtagctttgctaactgaattggaccaaatgaatgctgaaaatcaagttttaagagtgttggttgatgaggtgaacaataactgcaatgccctacgcatgcaaattgtcaagctaacgcagaagcagcatagtcatggggtaatttatttatttgtttttataacattgaatatcaaataacttaataaataagtagtggtatatttgagtttacttgatagatccatcttaataaatttattgagttccaaaaaatagatctggcatttgatcatatattcaatgctgaaaacatgtatgcacttgttttttatttggttttgtgtagaattacggagtgatagggaaaatggaagatatggttccaaagtcattctaagacatggatgttgctgacgaggatgagccaaatacccagcaatctttagaggggaaactgagaggaagcaaaagcatggttgagttaggacatggcaaagatattgctgttttggagacagataagttggattctgctggaagggaaagtgcaaattaaagctagaatgcatggaagggaggcacgctgaccaagaattgatcagtaacaaagttcctagattggatccagcttcaaaaatcatgtcaatcaagaaagctcgtgtgtcagttcgagcaagattttcttcaatggttagtaaattatataaataaagtaaaattgacatgcaactctatcatctccaatatatagtaacatcatgtgatttacccattaacaaattcagcctagttagctagctaatcgatgacttctaatttctaaggaaaggggatgtaatttactaatgtgaagtttgcacacgttaatttcttgtttcttgaaaatacatcatggaaaatttacgtgttaactttcttttggatgaatcctttattacagattgcagatggatgccaatggcgaaagtataggaagaagagggcgaaaggaaatccttttccaagagcctattatcgttgcacaatgagtactggttgcccagtaaggaaacaagtatgcactcttgctaggaaattttttttctttaatttgcgttaaattgttctttctgctgagactagctaattaaagcaaggaggaaattctcttacggtattaggaaactagcaagacatttctggtgggggaaagacaaattaaaacttaatttgcaaaattttaatataatttagcacactttacctagcttgagttgagtgcactaaattaacaaagaattgaattataatcaatacattagtgaacaaaagatttatttaataatactgtactttaattatcagtaatgcacacccaactcaagtatattaggtttatacaagaatttctattgtacttaccaatcgatccctctccttttttggggacatacgctacccaaaagtgcctggtaagggcatggaaaatgatatacagcttagagtgtgaatgttatagggatcaaaaagcctgtatcagctggtgctttctaagaaatcttgaggggtaatgaaactttgccagttagctaatggctacaaattaaagccattgggaaggaattgatacattttgtctctaacattaacatgaataaataatatatgcatataattcaacaccttttatacaatcactcaatcacaaaatattatgtataataagtttgttagacttttataataagtatatcttaaatatcataccaaaaattatttttgattaattgatagtacaaaaactttataatatatatatgtgtgtgtgtgtgtgtgtgtgtgtgttaatttgttaaactccatgagtattatacagagaaatcaaggtttaccaaatagtggatttatgtttgttcataggtacagaggtgtgctgtagacagaagtgtgctgatcacaacatatgaagggcagcataaccatccacagcccaggcaatggcatccacaacatatgcagctgcctcaatgcttctttctggaccaatgccaagctcagatggcctaatcaatccaagcatattagaaagtgcttcacttccatgctctcagaacatggcaactctttgacctcagccccatttcccaccatcacattggatctcactcataatgcaaccaattcctcacagctacaaagtgaattaccacagggccaacatggcctcttattcccacttttggctcataagtttatgtcatttccaaaaatatttggactggcactgtgtgatcaaactaagctttctggcttgctggcttgcatgagtctcagggaatggacacaacttcatcatttgctaacatagtaaatgcagccactgctgctatcacagcagaccccaatttcactgccctcttgtggcagctataacatctgtcatggggagttcacattcaaacactaatgagcattgcaacaataatacataagactcgttaattgcttttgcaaattggtgtagttttgatcgttttcatattcaacataggtatagagatttttatttcgtcaatgtcatgcatacaaaaggatgttacatcggacgaatcactatattataatctttcattatttgagataaatcttaataaggcattcatttttttaagttgtgttcaatagcatatatcgctaacaaaacattttgcaagctttatgaactttattgtacaaacaaaaatgacatgtttttaattcttttaaaatagccaaaacaataaaattagtttgcttttttttcacgtacatacgcaggaaaagtgtttgaacaagtgaacaactacattatggtttttttttttttttaaagaactgcattatggttaacaattctttaagcaaattttgttatagtattttaatataaaaattacaaacaagtcttcaaaaccacgggacatttttaatttgagtataataggtttagctcctatatgatcaaccaaatttaaaatcatctataatataattttaagatatttactagtaataaacttatcataacaacatgcgattaaaggacaatttaaaacatttttatactcttgatggatgtattatttattctttattataaattttaaggatttatttgaagtttaataaacatgtacaagataaaaaaattacactattgatgaattaaaaataatctttgactaaatcaattaaaagtttgttgacatatttattataaaattcaacaaatttgttatatatgaaaatttgtaattaaatgatgattgttatcatcttttcctttctcccactctaatcttttttaaaaagaaaatccaaaaaaagaataacggttgaattaattatgatacaaattatcgttacacatatcaccttttttaattaattgtgatatgaattaccttttttattaaaatttgaattaatgatgatataaattatcctttttaattataatcaaattaattatgatataaattaatatcatatttaatttaattactattaaaaatgacattgactactattaaaaactgtaagttgtctcttaattaatttaatcttaattaaaaaataatagtttgtattacaattaattgtattacttaaaaaaagtaacttatatttataattaattaacaaaaatttgtaaagaaaaatatagaatataaacataattttgttgattacaagagtgcaaaagaattatacaatgaaaatatgatttcgttgataatatttttttcgttgcacttcctcttacataatggagacatgatctcattgtctaatttgttaacagaatcatgtttttcattaaaaagggtatttttggaataatgtcatttttaaagcacgtggggtacaaatagtaaaattgggagtgagagtggcaatccctaacaaaggtttacttttaaaccaggtcgtctcctcttatagcctacacacattgttccttcttgcacgacggtcgcaacgctgttttgtagccgttgtcggccttcaaaattaacaaaactactcactctccacaaataacctcacggtattctatttcttctctaaacttttcgttatttctttctagaaaatctgtgttggattcatcatacttcctcttttttttttcctatgttatcatcttcaatagttttttggtccggatttttctgccgtctattctgaagcgatgtttttaaagcacatacatttatagtcaagtgattcttcttgtttcttggcatagaaaaaagtgattcctcttgtttcttggcatagaaaaaagtgattccactcaaaacaagtttaattaatgttttttttttccaatatcttttcaagttacatgcatgcccttttgcttcctatattgagagttgaaggatttgaaacttgagtatgcaattaatggttatttgtgtgcttctgtaataacatataagcactttgtcttgtactccaatagaacacaatgagtgctgctgctttgctattctcctgctctatgcatgtgggtgtgtctcatcccaaggtggctgcaaaatcctctccatgctgtttgctcaatcagccatgggatcatttaaagtcaaaaacaccatttgggcattcaggagtctttgaaaatgttaaactttcacataaaggtgatgagattctgtggagggcgggggcccttcaagttgaaagtgcaccctccttctctgtggggcaaaaatttcaccttcatgatgtgattgaggctcagcaatttgacagagagactctcaatgccatatttgaagttgcaaggagcatggagagcattgaaagcaagtcatctaggagccaaatgctaaagggttacctcatggctactttgttttatgagccatccactagaactaggctttcatttgagtctgccatgaaaagattaggtggggatgttctcacaactgagaatgcaagggagttttcgtctgctgctaaaggagagacgcttgaaggtatgtcctttcaattaacaatgcaaagttttgttagtacttagtgggttctttcattgttattctatctaaaattggtgtttcatggaactttacttcttgcagatactataagaacggttgaaggttacactgatataattgtgatgaggcactttgaaagtggtgctgccaaaagagcagcaacaactgctagcgttcctgtaatcaatgcaggggatggccctggacagcatcccacccaggtatgaggaatttgccacaataggtacagattataattctgatgcttcacatagaatgtcaagtagatattatcataggatgatttatttttcaaagtaatcttgagtctattgcccttagctactttttgactgcagagattgcactatttcattttcatttgtagcatctgccaccttgttgttaaaaccatgaattagcattgaactatgatagataagcttttgctgctgagcaattttgtggaagcataactatgtgtgtctggtaacgtgtcatggtcctcgtggacatggtttttgagatctgaatagaagctactggctgtgtaacttttgcatcatttgttgatttgacctgatttgttccctgccaaacgtatttccaaacacagggaaaatccacttaacaaatttgtttccatgactcattactcccaatcaaattttaaaaacaaacccccttattatgctgatgctgttcatggtatttgaaactgaaagggccacaatttctccttataatttcttaggagaagttgattgggtagaaggggtttacaatgacctatgaatataaaattaattcttttatgggacataccttcaagacttcgactcaagaaattgtatctttctctttcttggggaaaagaaatttattttcaattaaccaaaaatgtgccaaaaaccaattgaagtataaatctaaatggagttccatttttctagtgaggtgcttgctatcaaggattgaaatggtagcttcctttgagtacacaccagtttcctagccaattataacaatatattatggacttttcaatctgaaggtttctttgattatactttattctttaggtacataccttatatattttactagtttatttacacttgacaagatgattccatgtttgattcttctttagtgtttttcttgtagaaaatacagacaaaggggaatttttgtgactttttatttattgtttgtttattttgctatatttataatagtttgggtggtaattggatgatattatttttgtgtttcaaaactctttctttttcaaactgctcaggcactgctagatgtttataccattgaaagagagataggaaaactggacggaattagagttgggcttgtgggagaccttgctaatgggagaacagttcgctcacttgcacacttactagccaagtatcaggatgtgaaaatttattttgtctctccaaacgtggttaaaatgaaggtaactgttgcaaatactaattatggtttcatgagaaggataagatgttgggaattacatgacaaaatgagttatggaattttttattttttttcataggatgacataaaagactatctgacatcaaagggagtggagtgggaagaaagtgctgatttgatggaagttgcttctaagtgcgatgtggtttatcaaactcgcattcagaaagaaagatttggagaaaaaattgaactttatgaggaggcaagaggcaagtatattgtaaatcaagatgttctaaatgtgatgcaaaaacatgctgtggttatgcaccctcttccaagacttgacgaggtaagcacatattgccatgtcatgtgatatatgttatcccaatacgaatgcaagcattaagattaaataaactaaattggtcccttaatttcatgcagatcacagtggaagttgatagagatccaagagctgcttactttaggcaggcaaagaatggtctatatattaggatggctctcttaaagatattgcttcttggttggtaaggatgcattcacttttcaaagtgaatgggatgatctaatgtcaaaaaaattcagttgttttctttgtctcctttccttgccttttagcatgtttggtatcatgttgacgtaatttcacagttagatcagagctggtaggtattgcttctgcgtcttttagtaaatggacgtggtttcccatgtatctactgtgtttccaagcgtagttaggcgtcacaaatacagtgagagggagaaataaaattttctttttacatgagtaaaatttccttgaaatgcaagtttttttccacctcagtgcaagctacagtcactaagttataatataaacaatctaaattattataacgtggaagtttataacatccataaccttggtaatttgttatccataacaagaaacaggaccatgcttctgtgtcccacggaataatctgcatatcatcaaattctggattcaactttgcttacaccatctaattctactgatataaaatgagtaaaagttgaaactctagaaggcaaatgcacaatcatgtctctgcaaggcttaacttccttcagactaagtgtttgaactctgcttccatttctgcaaactaacaaagtagtcttcttcgtttaaatgatccttttatgagaacgaccaaatcctgcagaattgtttgttttacttatgattcttatgctgctttttgacttggttgccttaagcatatgttaatatcaaagtagggattgggatgcgtgatgcaaggtattttgttctatatgactatgtgtttgtgcgtggtcaggctttatggaaatccatattaaggcgcgagttgttattatcgtaataatttcatgaaattacaaatcgaatatctttaaaattagtctttgaatgttaataaaataggaactaaattgatggatatttaatactttgagagcagtgctataccgtacgaaaaacaaaaacatgaaattcacgaatcagttaatttaactccgatataggtattataatttgtagccacgtatatttgtgtggattcgtacaatgaaattttcgtaacatttagtattttccatgtgatattattgtctcagcaaacatcatttgatgaaaggaatggaaagtaactattattggcaactgtagcaacaacgtgaataacctgtggttttttaaactctacccaatgcgaagaaaaaagtaaaaatgaataggctacaatttttctataacaattcaaaagcaagaataaaatcaattaagactataaaaaaaagtcacgtgaatgttataaatagacatggaaaaatgaaagcaacgtcactaataaaatatagggagaaataatttcaagcaagcagtataacttaatgaaagtaatatttagcatagctatacgtgtcagctaatatgtagggaacctagggtccacattgtgggcccaagactctaagccaccaacaatatccttggcagaagtgaaacccattttgtgaagatactgaacagccctttgagaatcatttccccttctgcatactacatacaattgtgcacttgatccagaaactgcaccactttcctcttcctctttcttcaaagctgatgatacttcaggcagcctagcctctaatgttgagagtggaatgttcatagactttggtagagatacaatcttgaaatggtgagttggtctaacatcaaccagcacatgtggttccttcttaataattacttcactgtactccttgctgctgattcttgattcactgggaagtagatttaacttcaaaggaggctgcatataaatggaatggaatgcattaatgacatggaaaatctcaaaataatatatactgggagacaattttgtagtcttttgggaggaattttatctccagcaatctcatccaatacaaagtgcaaatgaaaaatatacccaactaaaccttcaaacaatttcatctaaatacaaaggaggtgaaaggcaagaaaaaaaagaaatcataccacacgcaagggagtctgagtgaacttctcataatcaaattctcggaattgctgttgggtaaatgttgcattttctccacaagcttcacactgcatagaccttcctctaattttgacctgtgtaataaaaaaagtataatcagtaactgataaataagatcttgctatggtatcatcctcaaaaaccataatataatttttttactttgagacatcataattacaaatatgatttggaactgtatatattacaagtctaagtttaatttgggatagccagtttgaaaagcaatttgttattagaattataaagaaaatgattggtctgcatgacagttattattagtgacagaaaaattggtgtgaatatgagaatcactcaatagtaatgtcaatcaattcctctaaagagtatccttaagtaggaaaacctttaccctaatagttccaataccactaggatacaaaaccctaactttgcatccaggtaatttatcgaaataaaatcctaatttataagaaatcctaaacattcaaacaattatttgatgccccacttgtaaaatcctaatagacattggagttcttaacatacaatacgaatccgtccagacaatgcatccaagagaagcatccttcctgagagtggctcaccaacagaagctgcaattttaatagcctcaagagcttggagacagccaattataccaggaactgaaaatgatcagagcaaatgtcagaaaagcagaaaaatagcaatagcagaacaaaaaatacaaaggtactagtgagaagtaatgcaagttgaacaataaatattcataataactgacacggatgataataatcacagtttagctaaacgaattatgaaacaacttaaaacattccaaacaaattgaatttttagccaataagtcttactaaagagtacactctccggtaaacaataagaatttcttattgtttgcaaaaacctccttttcagtaaaacttgattgcttaaaacatagatacttccccgtttgtagagacagttttggcaaaaggaatcaaacaatcagaatcattttttgttgtcactaatagttatattacatattactaaaagtccatgactgaacttcacaatgaaaacaggagagcagaagaatttgtcttatggttcacattgttcatgctaatgaaaatgtctcgcagactagcaatgagaagtaaaagtgatacagttcacaaagacagtagtaattttacctactcctagaactccaccctcagcacaactttggcatgctgttctaggtggtggagttggaaagaggcatcgatagcaaggaccaccattgtaattgtagacagtaagctgcagtaaaagtttccatatttaatcctcaaattgtgatataatcaagcacacaggagtacttgtcgcactatgaagcattattcaacttaaatgctaggggaaaaaaaattagacatatacctgcccttccaatcccagtgcagcacctgatacaagaggctgcatcacaggaaaacagttaatataaaaaattgcaaaagtaacttaagttttcccataaatcatactatgtacataagtataaaaaataagaaccaaaaacgaaattgtttaacggaatgaaatataagaaattcatataattgtaacttttcaaatttataaaaaattgatgtctactgggagcaattgcacaaagattttggagataacaattcatatggcacatacacactgaaatattttatcggtatcatgcacataggagcatgcataacttcctttttgttgaattaatgtagatatcttttgcattgatgaaccaaaacattaaaaataatgctgacttagaaagtgtattcatggaggaaccaaaaaattaaagcaacaagtgaaaaggcccatgtgacatcaattcaaatggtcacaatctgttcatacatcaaaacattcagatttacctttcctagaaccacacagcaatcactgatcaagtatcgggtaggagcattatctgttgcatctactattatatcatatctaccaaattcacataattacaaaaaaaaaaaaaaaaaatagtcagtggtaatataaaaaatgaaatgtaaaatgtaagtatagaagaaagaggcctcaagcaaaaagaaaaatcaatcttattatagaaattatacttgctgagaatttccaaagcgttggaagtccgcaaagcttcttcatgttccacaacttgaatagtggagttgatcctaatattcaaaatatcttagttccaagaacaatgatgatacaaatattacaataacaaacatttgaaaaagaaaatttctcatgggattttatttgcagtttgtcaacaaaaattgatgtgatgaatggttggtgaaaaagtaacctacgagcgacaagcagcagcagcagatttcactttcggcttaccaacatatgcttccgtgtggataacctgaaataaagcaccaacttgtccaaattaataaaaatagtgaagttaattaaaaaaatagtaaacgaacacaaacactgaagcaagacacatattaacaccttgtactcgcaaaagtgcaaacgcccaaaggctgatgccagacacaaacacaacaattcacaatgtacgtgttgcaccggctatgccaaaagagggcgggaaggtaaaacagataatacaatacctgcctatgcatattattcagctcaactacgtcatggtcaataacacccaagcgccctgagtatagtttttaaaatgtaagtttcaagaagcatatagacagaggttatgtttgggacgagaagaaaataagaaagtaaaataaattaagtttcccccataagttaaaatcaacttggcacttatcttctccaaaagcttaagtgtataagatgattttaacttgtgcaagaaggtgacttcatttttctttcttatttccttcacttataagtgtttatgaaaaatttatccaaacaaagcttagaagtgtcatatattaccaacaccagaagctgcaaagtataacaatgcaggagcacccaaacctccagctcccacaactaagattgacgacttcaatagatttgcctgccctgcactccacaaacacaagaaggtgggaaaatttaagacaaaaaaaaaaaaaaaacaagataaacatgcagataagggctatttgtctataatgtctattttcgcagtgaaaacaatacatggcaaaattgcaattgttaaggttgttactataaagcagttgcaacatggaactaactacagttaatactcaaacacacacgtgcaacgaatatgaatcttccttcattcttaatttaaacttaattaggtttatgtagcatgaatgacaattaaatgaatatagaaaatgttgaagagaagaagaccttgaacaccaaaggaagggagcacaaggtggcgactgtatctgtgaatcatgtcctgggtcaatccattggtggggtacaatgaagaagaagaagcatagggtggtgcggcgtcgttttggagattaatctctttgagttgagcttcaagcgcagagattttgtgctcaattttggtcttttcgtccttcagcaaatccagttcccgaagaatctccgacgccgacatggcaacgcaacgaacaaactatctatcctatgttgagtgttgacgatgttcctgcgcaaaagcagggttacctactttctagtccaataatactgtgcttcgaattgatattggaaaaaactagtattaattactaatgtcgtattgatatggttattaaaaagtacagtagtttttacttaattaacatttcattcaaaaaataaacttaattattatgttagggtgttataaaaaatcatttttgtatgctctaaaaggattaataaaggcgtgaattgattggattttttgttttgatattaacattttttttacttttataattagtctttgaatataaaaaattccattatatatatatatatacacacacatattatttctatattcccatagtttttatattgaacataaattattataattagttaaattataattaatattttttgtaaatattttttaaaaatttgtaattagatatcatttatggaagttacaaaaataattcttaaaatttttatgttcctataaatatttaattatttaaattaactaattttaattatgtaaatatatatatatatatatatatatattagttaaaaaagtataactccttaattagttttaaccttttattatcaaagtcaagatgcccaactcaagtttgttagagggtgtgggttcaaatcccacttccgacatttatctttaaatccaaaaaaaaaaaaaaaaaacttataaaaaattattttattttattgttttattattattcaatacttataaaatgtcgatatacattatattaataataattacacaataataattttatgaaacatttacaaagttagttttagtaattattttgtaaacacaacctataataaataaatatttattatagattaatatctttaattttccactaatatattgttgggttgagtgatattaaactcaaaataagtaagtaaagttttgagatcttgtgaatgaaaaaatgtagataaaagaaaagatcacaacaaagtagttaaacatatttttcgaaaattagtcatcaataaaattgatgaatatttcatcatcaataacatataaaaaatatattcatttattttattttggtttctagtatgatatttttattttaaaaataaataaaatccttaaaaataataaatgaatgtattataactagtgaatgaatgcacaaaatcaattactcattaatgacacagttgaaacatgttagtactacctttctcataatacctaacaataatttttcatttaaaacttactttctactaaatgctccactattcattaaattcattttttaaaatcaattcgttacataaataagaaaagttactgtatttttttcaataattacaaagaaagattgtgaagtacatctcccaacgaaaaagtgaagaaagcctcttaaatgaggaaagtaagaataagttaaagattataattgtgactacatatacattaattttaacttttaaattaaattttgattaaaataaataaattagttttgttaaaaaaaatattattcagatatattgatggggaaaaaattgaacatgtattttgaattatgaaagtaattttgtcaatataaactataaaaatattcttataaaggtgcttgtttttacttaacaaaaagatgagtttgaaagcttacacttactacatattagatgtgagatcttattttacactattcaattaatatgttacaaatttagcaatgaatttttaaataggaaaaaagttatagataaaaaatttatttctcttgatatattagaaaattgaattcgattatctaatgatgaaattaaaacaacatatataactaaaatatgtgatcatttcttgaagggacgctttgttgataaattaaaaatgatttttcaacctcaattcaacatgaaaaaacttaccaaaaaaaattccattttgataaataaaattcatggtatccttatttctaacaatacttataaaaaataataataattatccataattagagagaaaaataaatatttttttatagaaaatctttagtaactacattttttaatctagtcagtaaattttcaattttatttattgaaaaatgttagcaaatcattcgttttaaatctaacacatacactttatcattggttaattagaatatattaaaaattacaaaatcaagagaaaaagagtcattaaataacaaatgaaacttaaaaaatttgtaattatcaataaatttcagtcaactataaagaatatgtttaaaagagtatattcaaaaatatgttgttagtatttcttttatttcaatatacttaagtaataaaggttgaaattaaatattaatgttaatcattaaattgaaattataatttaattaattttgtgataagtgtaatgcagtttagtcattgatggagatttttcttttggtataagtcattaataagtgggatagactagacagattcattggattagcattacgtcattaacaaagggcaatacatggatatctggattgagtttgaggccaggagtaatcttgtccttattgtttttggtttttatttaaacagacatgagagcccaaattatactaactagtaactagtctctatcaaacagccaaacatttcctgaagatagagagagggaagaaccatggtaggtggtcagttccacactcttctccatgccacttcaagatcctccatggtaaagcctagcagtagtaagccattcttcaacagcaccattaaggtatcccttttattttcatttcctttttaaatctctgttctgttcttttctttttctttcactcgtgttccaagttattctacttcaatttgcttctctgctctagagttactaatttacattatctacttgctgtggaaacttttttattttttgtacgaatgcacccactagaaaattaaattagactaacaaaacgtggaattttaatcatttttagtttgattttgcctttggttggaaacaagttttaattaactttttgatgtgtttgagaaggtagaattcatgtatttaatggaaggttttcatttttttgcataatccagttcttgaaggtggaaatctagacttgagaaatggattaaaacctagacaggctatgcttaattagattaaagttggaaaagtatttttgtgaattccaatttatatttgtgaatttcaatatataaaatgaaaaaggtagaatttgttaatttaagtgtaaaagcatatttgaactctctaataaaatccacacatgcactcaaagaatgattctattatgtgttgacaacatgtcacagtgaccagaaagtaatgtattatttttttgttattgaaagtatcagaattatgggcaagcgagcaatggaaaccgtagtaaccgtttgatggaagagagggcaccttccacagctgaagagttccaaagagttgcagaggaaaaggccaaggaaaccaaggaaggggtgactaatcagaatgttgacaagtcatatgatggtgcacaagaggctactaaggttcaatctgtcaagaacagctacaaatagttgtttgccaaaggagggttgattagaacttagaaaccactctctgaagtctgaatgaactatgagatttctattctatatctctatataatatatagtatgcacctagattaataagattattgtgttattttcctagagctcccttgtaacttgtaagcgtttctgcagcagcagaaaaaaccaaacaatttaaggccgcatattattaattattaatcattcttgcctcatgtacttgtaactactatttgaaattctgtgaagctaagaaatctaattcagttagtctgagtaagatgttgaagttattatctcttcctcactattttcaatttccaaaaaatctatttgaaatcctgggcttgggggattaaactccgcctttattttagcagattggctggttgattgagtatgttgaaattttgaaaaccaatgtagttaattggttggttagttgtttctactaaaaaaatttaccatctctatttttattttatttcacacttcaaaaaatatttttctttatgtcccataaaaatttaaagataatattaagggagtgtatacggtgtccccaataatttgaggtgttttgatactattaatttttttaatcaattaaattacatgtcaccttctcattaattatatttatttttttaaaattagtccttgattattattttttaaaattttaaaactgtacctttttaaaattaaaaaatatgattaaagataactttacatgtcacctttttaaaactgtaccttctctaatattaattacaatttttttaagtataccttattaaaagagagacaaaaataattgtatatgaaatgtaaaagtgaaaaaaagagagtaaaagatatactaaaaaaattgacagataattttagtatatatgataagattatttattttaaatttgtgtatgggttctaataaatttattctctattttgatgtatatgagtgaagggaaacaaaaaataagaagaagaaaaatgtgataaaaaaggatggagaataaaaagtgagtgcacaaatataattattatttgtgtattaaaaccttaaataataggggaaaacaaggagtattaatttttaaataggtatgttaaaaaagaaaaaaactattaacaagtatcttcaatgtattaattaaaatattaatatttcatattatatatttttaattagtttaaaaaagtattaaataaattcgcaccttcaaagtagtaaacgtttttttttttttcttcctattttaagacaccaggaacaattgcaaaaaaaagataggatgttcagtagagtcttgggagtttattctttacagcatcattgacttggtatgtctaatgtgttgtgtaatcacagcatcgcagaatcagcaattccttgtctaatgtggttagcttttcatttggtgtcaaaaaaagaagtgaaatttgtggtcatttaaacacttttttttccctttacggtgctattggtgaggtgagatgtgtccttatagtccattgagactatgtttttgtcccaactcctttaattttcgtggttgggagttatcgtccactttgaaatttattggaatgagagacaactcgacctactttagtacttgtctggcaatgtgcattattttggcacttagatgtatatctaggtattcgcatttttttataataaaaaaacagtgtatcaaatttaaattcgtgttaatactaattttaatattgatacatttgtctattggctattaataagataatacctggagtgtagatacgttaattctatcttatactgaaataagtatatacttatcatatttaatttgtgtactttaattgataataaatattaaatatataaaagataatctaaattcgatctccacataatacaataatatcaaatatataaaaaattataagattaccgtttaatctaatatgattttatcctaataaatctattaattctgatattattttatcagctatatttttatcaatttaaaccttatacagctatcttatttgcattttttatttattttctccttattttactcttacatccaaataaattgttaaaagctaaatattagtaattaataattgttagatgatatctttgattacaactatagataagatcgtggatattgtggataataacagtaaagattgtaaggttaaatagttaaagatgtccgccgtgattattaggaagatcgtgaggtcaagttgttagagatctcggcatgattatcggaaagaatcttaaactaacttagaggtaagtttagtataaataagggatgcttctagagaaaaaagtacgcacatcagttttctcttttctttccattaacactgtgcacacatctcaccagtatcgcttcgtgcatagtgattatttctttaaaggtgtttctcttccataaacatcttgagagaaagcttaatcctatatagtatttaccagcattctaactggacatttctgttcgtaagaaaatagaacaataatgataataaaatctttcaagtattggatgaacagatattctgagctttggcgacctcctgccatgacagttccccttgattctgcttatggcaccacgaaaattaaagtagtggaccaaaagtcagtcctgtctactcaaattcaaagagataatgaaaaaatatccatttagaatggaacaaaacacctgcacagagattcatacatgccaagtgggttaaaacaattactgtatgttttatttttagttgaaattactgtagcgtattgcaatataatccaatgaataaaagtaaaaacaagagtcgtgatttctttgcaaaaatatttttacctcaaacatattttttcgcctgatattgaaagatgcacttaaactgtgagagaaagaaagaagggtttacacttttactgaagagttacatacttagctttattcctatcctttgtagaatgtgagacaaaagagaccacgagtttgttaggtgtggaaatataatgaaataaaattataacttgactccttgtgttgtgtacaagacaatatatggggccacaagctcacaagagagtttggtaggtactaaagaaacaaaatggaaaattttattttgtgattaattatacacaataactttaaggtgcatgtcttttgacaaaggatgaagtaactaacaagaagaaagaccatcgagaaacaccaaatctacctgcaatgagagttaattaggagaaaagaaaatcctatgtaatttagaaaaaaattagagcttatgcaatttaacaaatataagtggtagcattacatgttttggcatgaataagatgccataacatgagtaaacaagaatgatgcggttgattctactcatctgtaaagagtaagaagaattcattgaacatttccgcgtactatagtctttagtcatgtcagcaaactggtgaagaatctgtaccctgaaatcgccaacacatagccacaaacttaactatctgctcaacataatggctgtgtattaatgaaaaatccaatatagattgggttattattcagtgacatagaactaaagaatgagcattttgtttcgtacgtggatcaggggccctgtcgtacgatggtaaaatcggtagaatcaatgcattgttaagatcctaaaataaggagattcgagtactatatattgaagattcaggtcacagcaggttttgctttgggccatggcataatgcccaaaacaaatgaactcgatgccatggtgtgcatctcgtgtactcactaggcttgggccaagacatgtgtttggttgagtttcttgcctttattttaacttctcccccaaacaagaaacttaaatagaaatttccttataaaaatatattgatttctaaggttttcttcgagaaaaataaataaatatgcacgacttgcaaaaattagtagatggaactaaatggccaaagttcaccatcttaaaattttcaattaccaagtattccattgattatttttttgtcgccccccccccctgcctcttttatcgttcaagcttttagttttctagtagtgttaatttgttgcatttatatcgagaagtgctacctatgccttttttattattattaataggtaaaatcctatattgatttcaacttgactccaaaaaaaaaattattaaataacgagtttcaaagagtatagtccaagcaatttttttcaacatttgataaatttcctcctgctggaatttttctgatttatatttcacatatgctacttttcttttgtcttaacatatgctacttgagttaacgtggttttgatgaaatttccggaatctttaaaagtccctgtcttaaatcgtgagtgccctgagtgatcacgaattgccattatggtttcctgattttcttgcagaattaattactgctgttcattaaattatcccaattatagatagtgtcgttgctgcagggtggcattttcgctactgcactactagtattccttttacgacattcaaacattcttgatgtaaatctagtattaattgtgcttcacggaaaatgacactttcacacaaacacacacttccttaaaaatgtcctaaagtgaaaagtaccaaccgtgttgacacttccacgcgctaacagagcgcgtcgaccaatcgggaatgagaaaaagaagtagtactaataaatgggaacatggtctcttgtgctgctgggtttccacattttgaaccttgtgatcgtgaccaataaatatacttgcatttgaattaacgtcgtggcactaattcctgcttgattttcgttttgggtggcttttcctcatgcgagaccatttccccgcaaattcggttacaaggaaaagtgcttttggtcctttagctcatgccgttcgttgcaaccgtaattaaaggggaagaatggaaaatcagaagacaagcaaacagagttatgaagaaagaaatggaaacacccaagaatctcgtgaattttttaaaacatatagtattgtcaatttagtgttatattcgatctcccttcctacatgctccaagtattacaaatgacacttgcctttttgtgtcggtagctgcaactattactattaggttgccaatttatcaaacttaaaacttttctctcaattgtcctttttgacgttgaaactcactaaattttcacgttttttaattatttagtttgtttgttttctttgtgataaattaaaattcttaggtttaaataaagtcgtaaaatatgacaaaaaataaaagcacatggtataaattgtccaagtctttaactactaacccaaaagaacagaaccttctaatttaactacgaatgcaactctttccaattgctaggccaactataagtggtgcaaattgctattccacctaatgtctctagacgcgtttctgcgtcaacattgattgtatagtttgtatcttactatatactaatatactcaaactacaattaccatggcagtgcaaaaattaagtaagcactgttaagaaatattctttgcccggaataatggaccaaaaaaaattctctataaccccaattagctagaagctaccaaaggggtttcattgtaataaacatcagcatgtgcatgtgattgatgcaatctagcaaaaacccctactagtgctgcagtattgtaggtacaagcctctgtttgaacgtaatttcgtctctcatctttaaattggtctttgatatcaggcccaccaacgagtgccccaatgagtacatttggattgggttcaacacgtccataccaattatcataaccctgagtgcacccaataaaacccttattttccccatatgattcaatggatgcgcccctatggtgcaccctccgcgggaattttggaccgtagcctaccaagtaactcatagccattggattagagcccaaaatataatcaacctgtgattttgccaaggccaacatctcatggggacccacctcccctttttggcaatgcagcttctgatcagtggctaggagatgatcagaatataccgtgagaagaaacgacgccgttgctacgtattgcatgttgttccattggcggatgtatagtaaccctcctggggtgcgctccacgttattaacgctgttgaggttcagacacgcgcataggtagtgctcggcttttgaacgatactgtttgagtatgacttcgtgtttcttgtgcttcttttcttccataaggaactgttaaaaggaaaaatgtcggtaagcaatttacggtacatgaatgacagggacattctttcttgtactcttttaaacatttttttataatttattaaaatttatttttagtgatagatcttgaataaagattttgaacttaatatctgatattcactagatattctgataaaggagttgaagaaatatttaacataaagaatgagtttttataaaagaacccttaatatgtgaagaaatttcctatttctcttttcttaagatctcaaaattagatctaatactaaaaaaaaaattatgcaattttaagaaaactacaaaaagtgatataatatttcaatttgaaatctatcactaaagatgttctaaaaatttattctcgatgtaaattgaatccaactatgctaatgctagaccctgaagaaaatatatatagagagagagagagaaatgctaatgacattttttaatattctttttttaatatttattgattaaaatttattgaaataattaattttaatagtatttatttttaattgatatttttctctcctaatttatattagatgagaaataaaacttgtaaaaattgataaattttaactaattataaaataaatatataaaaaaaaaagtgtgagaaagagtgtcactcctctctctatatgtataaagaaatcaatgatgatccataatatgtaactaaggtccaataatactggcagtatagtgctttttagtttttttttttttttcttttcaaagtgagtatagtacttctaatgcaccttttttgacaatttacaataaagaagggaagtgactctttgaattgggaagtgtgagggaattaccatggaagcaatggcttgaacaccagcgtacttaacgtcccagctgaattcagtcatggcccaagtggtcccaccaaagtcataagccttctccaaaaaataggttaaatattcctccttttgggtggccctatatagccaaactgctgcccacagcaactcatccatgtagccactaaccgaagcataataccctttagccactccaacactctcatcatacttgcccttgtacttgtcaccaaactcaaacaactacaataacacaacaacccattgaaattaatcctaattaaattaatccataactacgtaacattgtcaataaaactaactcatatacctgttgtgcatgatgcaaaagtagttgagagtaatgtgggtttgttctcctaaacaaaatggatgccgctgccaatgctgccgccgtctcgccggcaacatccgagccagggttgttggcgtcaaccttataagctcgccgtgatgtcgtcatgtcctccggccgctgccaacagtagtgatcagtgtcgccgtcacccgcctgaacattttaactcataagaccaaatatacacatataaccacttttataaaggaatttaacatcttcatcatttcattaccgtagcacacttcttttttacttttttattgagtgaaatttctgtatctttcgctaaatatgttgttgtcatttttgcaagtctgaatcctaaactagtgaaatctataacgtacagtattaaaaatatattatttgcggacaatgtttgataaacatgttatcttacacctagagataggtagagttgaaaaaaagaaaaaattataagtatgaaagaatttataatttgattgatataaagaaagaattaagaaatgttggataaaatatttaaaataaataagtatatgtatatcattactcattatttgcatttatatagtaacacaatttctaattaatatattaaaaataattgttactatatgatttaagatattataatctccgacaaatctttatgttttttaattggacgttgggtgtcgaataatctttatgtaataagtataaatagttacatttcttaatttattaaaaaaattcataacatatcccatgattaattgaaattagacgaccggattttacataataattttccttttagatactctaatttaacaaatctcatttacaaaattccatgttcatgccaagctgcgagtgataacacgcgccagtcacggcgagattgcggacgaatccgttgacagctccgacatttaaatctattcctccggttagcttggaagaagtaatcattcatcccattttcaacggcggcgcgtgggtaatcaattttcaaaaaaaaaaaaaaaaattcactggaattgaaattaatacctgaacccaaagaacatttggttgtgtgtgtgccttgatgaaataatcggttccccacttgatagtctccagagcgtgagcatactcgccggcagcagcgatttgttcgccgtattctatagcaccccatgagaggagtgttatggtgaaagccattggcaacccaaatttcacattgtcccctgcatcatagtaccctcccaccaagtccacctacgtgcccaaaaaaacaataaccataatattagaatgaatgaaaagctagcacaaaaggaaaataacatagtttaaggttaatatgttaatatgaagtaatgtatgtaccccttgttctaggccatcagtgagggcagaatggtgacgccaagtgaccctttgattgtagggtaagcgacctgaacgctgtgactcgaaatagaggaggctctgggacagggcttggccatagttgaaggactcacaaaagggaataatgaagattgtgatgagagagagtaaagcaatgtatagtgtcgaacaccgtatattgttcttttgaacattgcctttcttcatttctccctctctctctctctctctctctctctctcccccatatgctatatctttgtttctctttatatatgctgtgtctagtgttatggggttacgatttacggtgtcgttttcgtagggtcttggctagtgcatttggtctctcgtttgttttgtttgtaaacaaattcaaacagcttaatagaatagaatgtaaagaaaatatattttttaatcaagctgggcgcgtgagaaacatgataggggtgaattttctgtgtaattgaacggctttattatacatttcaatttggaacggtaaggaaacttattattcttagccttgctagtgtatagaatggagcccgagatgtttgaaaaggtatttttcaggaattcaatcaattctcacttggatgctagcataacggtatgtgccatgtgtattgtcttttaatgtctttgtgtatgtaaaaatctctggatgtgtcttgttttttaatgcctttgtgtatgtgagcaaaaatatggttggtaactttattcatgcgaatgcctcacattacaataacgaaagaactgaactacctgtgtatgtaagcaaattcatggaaggtaactttattcatgtgaatgcctcattacaaaaacaataccaaatttcacttttccaaaccctcggtccggttgattaattctttttccctttggttaaactttctatttatgtttggcttaattagacttttcctatcttaggtattataatggtgcattttgatcttttaaggtttcaatataaatcgtattctctaatattataattgtgcaattttattattgttgtgatgtggatatgaatcagggcaatggcacaataattcatgatggtgatgagtgactttggtagttttactcatagagattctcacgatcaaatcaaaatgtctatgagagtaatgaatgagtgaagttattcatgcctaagaaaaactcacctatataggcatattcagcgagaaagacagttgggtttgttggattccacgtgtaagatcacgtgaccagatgtaatagggtatcctattagttaagtttggatattactcttatttaggtaatttggggttaagtgcaagtgatagttttagctactaagtctggtgttgtttagggtggttacttttagtctggggtaaataggaaaagcctctttttatcgatcttcaattaaatatttaacaaattttgttaatatgttgccttacacaaatggttacgtattttcctaaattatgtgggaaaaaatgtaaacgttaatcaatttgaaatagagaaaatacattgtatatataatctcatatgtaactagaggaatctctctattaaaaaaaaaaaaaaaaaaactagtttaattagccggaaatgaaaagaaaagaaaagggaaaatagtactattgtcgtgtttaagtattttaggtgtgaattcagaaagaaagaaaaaagtaatttagatgtgaatatttcttatttctttaaaatttatttttgaatcataaatatttacattattgcctagtcattcaaaataggattttttttcccacagtaatcctttttaatatacatgatattgtgctaatgatatatcgttaaattttaccctaatgcctattttatactcacttgctattcaaccattttaatatagttttgggtaagcttgctaagtctaggcaataattatactcaacttgattgaatggtatgtaatatattataacctaaaaacagggacggattcaatttaggcccaactgcaccaccagatttttttctcaatgtatgtatagttacaaaatgctttcataatttgaaatgtagtgaaaaaaaactataatatgaaaatcgttcctagttaattatatatgtgaatattatttctacagctaatttttttttggatccgtgctgcttcaaaagctattcaaccatttaatgtctttatgagataaaaaataataataacttcaattcgtcaaatgtgaataggacaaattatttggataaaatatatttgtgaatcttctacattatacgttaggatgctaaactcaactcacaatttttttaggctcttactatttacaccccagacacccccttcctacctctcaattactcattataccatttttttaaaagaagtataccccttttattttccaaaaatgtctttccaaaattacatatacacattccgtaaatgtatttccctaacaatgattcatagttataaagatatacttccagaataagtatatattttttaataaaatatcacttaagaattaagctgatttacaataaataaataaataaatgataaatatttatattatactcatatttgttagtcttatttttatcctatttgttagaaaacgtgggtgtaaatagtaggagcctttttatggaagaccaacttacattaataatcgtgttattgggacatgcccgtcttcctgatggaccatacgtccaaagctaagcccgctatccactttccatttggatctaagagtgaaacttcttgcaccttcatatttttgcttggtaatgcaagagggtgcaggaagcaaactctgaatgctatacatgtcacctgtgcattctcttatgcactccttttgacaaagagccagcaagtgcattgatctttattgggtttgaaactgcctctgttgtacgtgtgttgtgtatgtggtgaaactgaaattattcaattttaacgcttttgcttatgataaataagctaatgtgagtatccttttgactgatgtggaaaactttctttcacctgtactgaaccgtgagaaaccaaggagtaacattcgaaaatttatttgcccttattctgtaaattggagttgacgtttgaaagggcagttctggacgaaattatcatagggcaccctggatgaacaacatttaaaaacattgatctaatcatctgcttaagaatcttagaaacactaataagtgcaaaggggtaagtgggacaagattggcaaacctgagatcacaacgcaatatttaaagggtaaaatactttgttcttacataagaaacaaataatatcttttaaacaagaataatattccttaatatatctataatctataactatatataaaggaaatagggtactttagtatataaatttgtatacccattttaataactacaataataaattattgttttatctctataatcatattcacaaatcactcactaacttttattatctttctttttattcaaagaaaatggaaaaacagtttgcctgttttctcctagtaataataaaaaatacaaaaaaaggagctggtgcgaagagcagaaaaagggtctgaatatcaactcccaatcataattctagaggcctacccgaataacagttttatttattgggtcattatcggcatttatttcttatactctaactttcactattatatcttgtaccttctattatgttctgaaaagactatttcaaaatggtcatttacattctttttcagaatgcaacacgaggtatatgatataatagtgggactgcaagatgtaatagccctaatgaaatcgatttcataacatgaactaagagagacactgataatgaccaaaaacaaaaaatcatccgtggaccaaaaaaaatgaaaagagctgcacccgaaagatacaggaattaaaagagaaacttgaaataagtctggcctttcacaagtaacacaatcctttattggaaagttatggctttgtaagtttccttcagtgacctaaactgataagattgaggtatttgttcactatttaaaatttaaattaaattgtatcgaattttttttaaagattaaattgacttcatccattggttctaatacttgaggaacgtattattggttctctcccttaaaacacacgttaagtttttccacttgtgctcttaaaaatcttccgtactatgtgtgtcaaaaagagtgagatggaagaaaaaccaattcatcaattatactcaaagacgttcttgacgcttatgattttatttaatcaggatatggacaatcatgactttcacgattctctgtttcacggcttccacattatgatttacatgattatggcttcttggtctaattcgggtataaaaaatcataaatacaaaatcctatgcgtttgaatgctttcccattaagatttacatctatttctcactccagcacaatgaagattgaattcaatgccaggaatttggatgacccaaaatttacactgtatatattattttaagggaagataagtaaaaggttcaggattttttttttttttttgccggggggtgggtggggggggggggggggtgggaggaggtagggagggggatcaaagaatgaaaataataaagattaagattttatagcagagtatgagattgttttaaatatattgataggtttatgtttaatcctctagttcaatatattgccataatttgttccctgaagttaattctttctaaactaacttttggttttagtttgaaaagttatatatctgttttttctaaccaaatatttcacagctaaagatgagttctatcgtttatgttcttggtgaacgagttacttaggtttacaaatacagttttatgcctgaagccatggaaaagataaatccaattttttctgttggggtggctagaaacaaggataaatatgaaacataacgtctacattatgatatatgcatgtcccacttccacccaatccatcaattgagatctccttgtccttatcgaacaataaaatgctccctcctcaaatggttggacaaaagcctctccctccaaaaaaaaaaaaaaaatcttcatccccaccacagtgccccaatcaaaccctagcaagctaaaattggtgtccaagtgaaccaaccagaaaaccgtagagtgaacctccatcataaagacattaaaaattgcccatataagcttatgtatagttttagggatgaattcacctaaaatctccagttttaattgaagaatttacggatcgtctaagcttagcatgaatgatctattaatttattctttatttctacttttgttgaaaatgaatttttagaaggaaaaaaaaaaaaaaaacttaagatgacaaacataaactactaattattttatttgtattacttcttgttaatgttattctccatcacatatcgtggtagactggtagcttggacaaccaagtgtaccagatgcaattatatctaatgtaacactagttattaagaaattgaacactatgaactatgaattatgaaatatgaatgagtcttaccgacctaatgaggcgggtaccaatccaaatcgcctatcatattttagtacacctgagagtttaagtgtagaaacgtcttagctccctatttattattaagatttttaaagtaaacgatacctgtgtgaaattggaaagatgcaagttgacaaaccaattttgacttgattaaaataaaaggttcatttagtgtgcaaaatatacagctaatgatttgttgataactaccattcgataatatatatcttttaaaatttataagctgatcattaattaaattaattcaatacatgtgccaaataaaaatatatctttcatctaacaatttttttccgtaacaagtcccttttacttaatttgaataatgacatgactgtgacgacctgaaatgggacctttaaattgatcttcatttttgtgcatgccaacgccctatgtgtggcgttgagagttgaaccgaaagaaagaaagaaaatgccctccaactccgaccacttcctttggttaattcaacgataaataaattcaatggctgccattattgttaattttctttacggttaataatattattgaaggataaaatggctgcagaaaacaagtactaaaattgatgttttattaattggcaccaaagtattaattactactaccttcgtccgcaagcattttcaattagcaaaaggtcccccatacgtatttgattgcatcattcataattgcaaagctagttggctgtttgtgttagcatggaaaaatggggcatttcaccgactaatctacggcacaataattttttctgtataaaaagtattaatcgcacgtcattcttcttctgttttttttttcttcttcttgctaatggcacgtcattttatcttttctcatttgtgtttctcaaaccttgtccatacggtaatatgacaaatgaaataaatttagttataattaattaagatgataaaaatggataaatataaaatattttaacattaattattatttcctagtgttgttctttttgtttatagggatatagggtgtgacaatcatttggcagttttgattatgtagactaaaataatgttaaatgaaaaccctttgaaaatatgacatttaggacaaactaagtaaaaataacggagcaacttgagtttttggttgtatatgttgctattttaggatacgtttggatgaggatttgatcaatgacgatagcatcaatctctgtttagttttttaaagattcttatttttaaaaataatcatctgacttttaaatgatcagtacaataatttaaccatcaaatgatattattttaatactaaaatatgtaaatttatttattggggccaaattaagccgataccaattacaccctacccaaaagtcattatttcaggctgcacaaaaaaaagtcgttattttagggttaatttatcggtcactagctatttaaaggtgcattcacttgaaaatttactcattttctttttcatagggtcactaaattaaatgttagtaatcctgaaatacatatcataatcaaaggacaaaaattgaattttggcatgtcatttgtctaaaaaactttatcctatcatttaatatattttattatacaatttaattaatttgacaacacatgaaataaacaaaattaatggtatatataatttttttactctaatatctctgtactggctatatatgtagtacatagattgaattttggcatgtcatttgtctaaaaaactctgataatgtattcgacataagaaaaatcttactctaatatctctgtactggctatatatgtagtacatagattaacaagttaaacaataaaaaaaattatggaataatttatttgttgttgacattatgattttttttctgtacttttaattctttaactatccaccaaatatataagatagaaatcacattaataataataactaataagaaaatgtatagaaatcctttttattgcttagctcaaggaattagttattatcctcctcaagtaaaatttctatgaaactcgtggggaaaaagatggaatttccacacgatggtgtagtagtgtctttcacggccttttgagattttgactaagataaaatccctatcatttcgaattaattaatggctataccattctgtggtgggatgaatgaaatcagaaggaaacacacagatcaattaccaacatttcccgttgccaaacgaggagaatgattattgatcgatcctgctgcatttctcctttgtcaagtcttcatcattacgggcatatttagatacataccataattacttttgagaattttttttttgaaaatatacgaatttttcagtagaaaaatttcaaaaaacacttttaatcttatattcaaacaaactctagtttgtcctcttcaaatgttctacaagtcttgtagttttcattggtcttagattcaacttcatttgatctgatctacaccatttgtttaattaaggaattacgtgcctatttggatacacggtgacagattaaaactaattttgaatacaaatcattttatcaaatttattttggaaattattttttaaattttatttatatttgaatacttttactataaaatcaaattaaaaataaaatatattataatttttatctaaaacaaaaattattcaaaattatttcaactcataatcaatttagaacttaaatttaatttcaattttttataaaaaaattaaatatatgaaaatttatctaaaatcaattttagaaccacagttaattttctaacctaaaactaaacatgcatgtttttccccttgattataattaaatattaatttaatttaatttgaatgcatattcacggtgtgatttctttaaaacttttataataactacttaaactcattatctataagcattataaaataaataatctcatttttttagatatttttatccttaattatataaactattacgacaatttattttaattttaaataacaattacatattttaaaataagttacaactaacaaagtagttttggaataatccctgatatgcattagataaatattagtatttttattgttaagaaatgatttcttataaaaatacagatcttatttttttttaaatcatattacataaatttactccaataaaaaatttataagaaccgatttcttcgtttaaaaatcattcaacaaactttgatttggagatctctaaatctacagcaagaaatgaatgtaagcctgaagtaaagtaaaatcccatagcaaacgataaaatcataaaataatagtattactctgtcatgatgatgatgcctattatagtattattcatttgccgagagaattgatgaattattatatatatagtcctgaattaattgattcccacccaatttatttctttttacccagaagaaacaaaaacagagagaatgcacatgtcatcaaatcaagcacggctggatggcaaagtccaacgttcaaatttgagcaaaattattgaaaccttggccctgtttccgtaaattcatcattgtttcaatcgaaaatcaagccaataatattatattttctcggctatagaaccaaacatgtcccttggcaatcgcgacctcaccccgttccattcgagacgtgtccctgtcgacaacgttgtcccaaacgatacgctgcacgtgtacggtcaataacatagcctactacatgatccaacggacagttcagctaacattttctaactgttttttttctatacaggaaaaaaaaaaaaaaaaacatttgtcttccgcaagtagtaacattttttctaacctaacattagcggctctgagatagtgcattggtggttgggtctccaacacaggtcaagggtcccacacggtgtaaagtgaaagctcttttccttcaaccacgttggcccactaagtccccaatcactctataaaattccacaccctctcttctcacaaacaaaataactgcaccctttctttttcttaattcctctctaattatctgcatgctctgcttctctctcaaacagagcatggctcctctcacattctccttcttcttcatccttatctcattcttttcttcatcatcaggtaaatacatctctcactactcttctttcagtttgtattagaatttcgtcttaccaagatgaactctggttgtaattagaaaatagcacttatgaaactgcatgtatattttgttgcttcgtttcattttgcatttgaaagttgttaactttctgacgggctttgcagaagcgggatcaatcggaataaactatggaagaattgcgaacgacctacctacaccggcgaaagtggtggagcttctgaagactcaggggctgaaccgtgtgaagctctacgacaccgacgccaccgtcttaaccgcgtttgccaactcaggaatgaaggttgttgttgccatgccaaacgagcttcttgccaacgccgccgcggaacagtccttcaccgacgcgtgggtccaagccaacatatccagctactaccccgccacgcaaatcgaagccatagccgtgggaaacgaagtgttcgtggatccaaacaacacgacaaagttcctcgtacccgccatgaagaacgttcacgcttctctagtcaaatacaacctcgacaaaaacattaaaatctcctcacccatcgcactctccgcgctccaaaactcgttccccgcctcatccggttccttcaaaaccgaactcctcgaaccggttatcaaacccatgctcgacttgctccgccaaaccgcttcctacctaatggtgaatgcctatccgttcttcgcttacgctgcaaactctgataaaatctctttagactacgcgctgttcaaggaaaaccctggcgtggttgattcgggtaatggtttaaaatacgccaacttgctcgacgctcaaatcgacgccgtttttgctgccatgtcagcactcaaatacgacgacgttaagattgccgtttcggaaacgggttggccttctgctggggactctaatgagattggagccagcccggacaatgcggcgtcgtataacggaaacttggttaagcgcgtgttgagtgggagtgggacccccttgaagcccaatgagtcactcgacgttttcctcttcgcgcttttcaatgagaaccagaaaacgggtcccacgtcggagaggaactacgggttgttttatccaagtgagaacaaggtttatgatattcccctcacggcggaggcgccgccgtccggggttggaaagagccaggttccggtgagcggtgacgtgacgacgtcgtctaagggccagacgtggtgcgtggcgaatggcggttcttcggagaacaagctgcagaacgctcttaattacgcttgcggagagggtggggctgattgcactcccattcagccaggtgccacgtgttacgatcctaacaccttggaggcacatgcttcctacgctttcaacagttactatcagaagaaggcacgtgcatccggcacgtgttattttgatggcactgcttatgtcgtcactcagcctcccagtaagtactgctgctatagtcacttagttatatttttatttttatactcatttttatccctataattatatctctgttattattttactttataatcttctttacaaactatctcctaacttttattatctatctttttttaaaaaaaacttgaaaacgcagtgagacacaaaatgcctattttccctgatcaaaataaattaaattaaacgtgcattaataataagtaccgactacgtgcaagaaatgttatgttttatttgtttatttcgccctatggccctatcagttgataaggttgaaattgagggtttattattgaatattgattgcttggccctatatggtcgacatggaacggttattttgtccatgtcattgcattaaaagcattatgcatgagtttagattttaatttttttttttttgttccaagagatgttaataatttgtgttgaaaccgtgtttttgaatttgtgttgcagagtatggtaattgcgaatttcccacaggacactgaaatgacggagatggagtgttttttttggtgaagccttgatttggatttaactggatttcgccggagtttttatgagcttttccattggtagcacgtgtttaggcttggagaaatatgcgttagcgtaactgtttgtaataaatcatgatgatgattactttggggggttattgatttcttttactcatttatttgtaattatctctattttttcaatgaagaaaaatatagaatacaattttttttacttgtgtttctactttacgtttctttgaaggatccatttcttctactcttttaaagcatttatgacttcttggtgtgcaagttattttagcaagcaatgcgagcttctttggaatgtctatcatagtttttatttattcaaacgagtactaccctacaaacttttattagactacaccgtacgtaaaacggaggctaataactaataagctccctaaattgttaacataaacaaaaagtaatgactatatacaaacaaattgataagttgcctttgaaagagcatatgttaattataaaaacattatatatatatatatatatataaagaaaagaaaaaaaacccacttggtacataccaaccggccaccatgcgtgtgataccgtcgatttctctatttgttggggggggggggggggggggggagggggatactatcaaaggacactataatataataaatgagtcaatattaatttgacttatttcagtgaaataattatttttttttccggccactataaaccataggtgtgttatgcaggaattctggtgagagagtcagatgtgatgtcaatcattcaacgaaatacattgtatttactaagggttaatcgacaaatttttttaccctttctcaagttgtttatgttccacgattggtgtctagtggtcatgaactgtgaccagagtgccactgttcccaaaatactaatcaaaatgtcacgcaaaaagtattaattctcatagtgtcacccattttaattcacaatacgtctaagcgaatttcgtcagctaatgtaacgttaatttgttggttgagcataaacgggtaggacacgtgatagcactacataattcgtttggcccagcaaaatacaaaacacagataataaaaaaagagtcattggtaacatgtgacatgcatggacgaatttgcgtcccagcaaattacgtttacgtgacccactgtataaacatctcccccttcccaccccatccctccttgactctccccagcgtgaaaggtaagttctttttttagtatttttctgttttttattttttgtaatttagtgttatatatttttatttttgtaatatattatttatatagttttagttgttaaataatatttaggtttgagatttaaaacattaggttagaggatatttagtgttagtttaggattattaaattataggatacatgatagacatatttaattaaaaatgacaatgttattataaaaatttaatattgtaatataactcttgagatataggaatattacaatgcattttcctgatgttgaaatacataatttaatctatttaacttttttttgtatcagaatttcatctatttaacttaacattgttaaagaatatttatcataaaattttaattatagattcatttagaaatttgtacggtcaaaatatatgtgtgtgagcattatatttattaaattcaataaaaatattttatttaataaatataatatatagtaatagtattaaaattaattatatgttataattaataaatataatatatagtaatagtatttcgctataccacggtcattgacagtttgaccacgtatttcgctggcacctatagcaaaatacatggccactagattgacgccacatcagctcacggaatttgctgggacgcgttgcgaattaggatgcttagtactctgggtattaatactattcactaggcattctggttaatttttttgggaacaatggtactttggtcatgttcctcatgaactcaacccatgataattaccgacggagtaagtactcaatctataagccttcacaactctttagtcccaagcctagagggcgaaaaagatttgcttatttgttttttcaatgtgaagttgggtaagtgttcgacctataatttaagagggtccacacacaatagccttgagaccaaagggtggtaatgttgcaaaacgtactcaatgacgttgtgtttctatcttaaatttgtttaggacaacagcgatttggttaagggtaattgttgatattgttgcttacttctgcttatgtcaagtctattacattgtatttccttcttgttttgtcaaatttttatctcaagcagttttattgtcattctaatgagctgattaggaaggagctacccgtcaacattttaaggaaatcggcccaaatcttatttgtgccaatttttgttcgtttcatgtgatgctggactttctttagtcgccatgttatattcaaccaaaacatgttaacgggccccaggcccagtttcacataatcttaaaaaacattttatttttttagtaatattatatcttataatttctgttaaaagaaatggttgccaactaaatatgttcaagaaattgggaaatatattattataaattaagtgtgtattttaaaatttagataaaataaaaaatataaaaaaataaacatgaatagttaattttattagaacataaaatttagaccaaaagattgaaaatacttaagattattaaaaattaattctataaacttctttttcaatgcaaggacttaacataaacatttagctttagtgtcttcatatatattttctaccatacacaaaataatccaagttttattcttaataaaatttcatcatatgcatacaccaaagaaggaaaaaaaccaagtaatagcagtatatgaacttttaatagactatgtatattttccggtcagagttaaaattattctttggagacttaaatatattttttatttctataatacattgattgttttttttgtccttataatttttttaaaaaaataatcaatgtaagatttctcttctttattttggtgcttgttattgtaatatgtgattaatttgcttttagtccttatcattttattccaaaagaactaattaaaaataacaaatattattttattttctaccaaaaaaattaataataatactacaatgatcaaacaaagaaacaatatatagcagaaattaaaggcatatttaaaccatcttttgaaatactacattttttcaatgaatatttttacattcacacaaatatggggaatcgaactcttaaatcaacagacattctatatttttttattagtaaggcgcatattatctatttaacgtgggtattttccaaatcataccgaataatcaatgaaaaattgcactcacgcaaacgcagaagaccgaagaggtacattttgtagcccagtgtccattcatttttcttttttgctaaggaatttacgaatggtacaacataaagatacttattttatgctaaattacatctttcaaattataacatattgccatttttatattctatctttatttataaaaaatcattattagttttcgaaattaatttttttcatataatcctatttattagtctttcactatttttcctgacaagtattgatttttgttttagtttctttaaatattatgaccttttatcttatctcttatttttatttttcagcgtcacataaatatttaacagacaatataaacgaaaaggggttaaatgagagattaaatacttttttttataaaaaaaaactaaataaaaacttgtcaacaacgtcaatgtttattaccagagttaaaaaaataataatattttttacttaaaaaacgggagacacattcattagggcagggtttagtctattatggcatgtgcatccccatgttcaaattaggcagcttttagtttctgatattttgggagaccagactcccccgtgttattggtgtgtagttttagtttgggtttggaccctttgccttcaaaaaaataaaaaataaaaaggtttaattccgtttccgtgaataatgagtttttgcatctgttagtagtatttaataaagcttattctggaactttattaaactaattgaaagtttagggtaatctaattagtttgatttaaataagcaagtcgaaggtgagagatgattggatgaagaagttggggtggtgtgagcatatgatattattattagtaggtgttggtgcgttgaaagaaacaataataaaagcgtaaccgaccacacccacccaaagccaatgtattgtattctggataagcacgaaatgaaaatgttgttgttgttgttgttgttgcgtaaccaacaaaatgcgcgggtctatcattttcccgcgcgcgcacgagtccaccaaaaccaaaacaacaaataaaagaaacagtttattattaatttagtgtctaaattattttaaataatttaattaattttaaactttaaatacttaatttaatctttaaatttttaaaaattaattaatttaattttcaatattttttacaaaattaaagattaaattaaatcatttaaaataatttaaaaatgaaatgaataattaaaccatatggaaaagacaaaagcctgtgaaagagagcaaaggattggacttgacttggccatgattcgatgaatgaatgcgtttcccgagcgagctgctgcaactggcgtgcgcgtttcgcaagaaaataaaaattaagagaaaaaaaaaaaaaaacatgcgttccttggccaacccaaatttccagaggagtccccacaactctttaacctatctatctaactctctttgtctttgcttcctagttcctacccctttcctttcttttcctttccttttccttttcctttttctacttctctctgtcctcacatcttacaaattacaatcgttaatcttctcaccatttccatcttgtgcagtaatatgtaacaaaattcaaaaacagtgcgggaaatatgttgatactatatttaattatctattgaattttactctatgaatagaaccaagtaagtaaatgtctaaatgatgaattcaatatatttaactaaactcacgtgaaattcattcagtaataaatgttggatcacaagtgtatttattttgaaattttcaatttctaaaatatatttatatgacattacgtttaaaataagatggtatgaaatggaactttataaaatatattcattttgtgttttttttaaaaggtatagaatagaacaactcttattataacatatatttactgaacatatgatgtaacgtgtatttcattttattactgtaaaatatattttgataaatagttagagagagaaagaaaaatcatatattattttgatatatcaccagttgaccatgcatcttaatcaatcaatatatccttcaacattattgtcgttcattccttaagtggaaaatttagaaccttaagttaaaaggagcaacctatttttaaaataaattttaataattatttacaataaaaggaattggaaattaaggggtaaaatatacatttttaaatattatgtgtaattttttaactgattagagtgcggatcttccattgtctctgacaggacttacataaagtgaaaccttactttaatttgattcacctacttgagttgatcatatatctttattttctatatatatatatatattcttagtatacattttttactactgttaaaatatttttagttttgtattttaatttatatctttatatttaatatatattgacaaatatttgtataatattttaatatttcttaattattaaagaaaaagggaatggggctggaaagtggagacgggaatgtggagggagaagagagaaaaaagaaaaaggtaaaaaaggaaagataatcaaagaaagcgaaaaaataaaattaaaaattaaaaaatagtaaccatttgatgacaattaaaatcgatccaacggttaaaattattcacgcacggtataaaacatgttttggtctcatacgactccgtcttactcaacagtcaagggttgggtgatgtgtaatggatacctgactagtagtttcaagcatagttttaaaaaccggaccgacccggccggtcggaccgggaaccggtgggtggaccgggtcgatcatgtaatcagatcggctatgctttcaacccggtgtaacccggtgtgacccggccgggtcaatggtccaaccagcgacccggtgacccggaccgggtcactatttaaaaaaaaaaaaaacgcttggtagctaaaatggcgtcgttttgtgatatttgttacttgtttgtttgaacttggacaatgatatttttttaaacatttttgtatctaaatatctatgttatgaagacaatagtaatttgtaattttttttaaaatattttaagacattgtcatgcgggtcaatcagtgacccaccggttcgaccactaaccagatcatgcgggtcgatcagtgacccaccggttcgaccattgaccgagtcatgcgggtcaatcagtgacccactggttcgaccactgacccagtgacccagtaccctgaccggttcagtcaccgggtcggtttttaaaacactggtttcaagaaactggtcgaaattcgataattaataaaactgtgaaaatcgtcgtccaatcgaagagatcaaaggaatataagtctaaaataatttattgatcaatttatatatatatatatatatatatatatatattatgtagaagaaggagtaaaatagtatgatattttgtttaaatttttaaaaatatttttttataagtattttttaagaaacaaatatgttttatttataaaaaatatttatttaaataaaaataatttagacaaacacatcagaaaatataaaactatttattttatttgaaaacatacttattttagaaaaattaatttaaacaaactagctcaatatttgaggagattaaataactttctagtttattttactaaaaaaaaagtttgttaaattagtatgtttggtaaaagagtttatttgaatggtctatattgttttagtagtatttcatatagcgtttgaggttataacttcgtaatttatgtttttcttcactactatcttattgtaatccattttttaatgtcttttaatgtcactttatgtatttatcacctacttagtttaactagtagttttgtacaaaatttaaacgaatatttattaagttaaaactataatatttttttatatttctttttactgattaaatttttaaaaaatatatttaaatttcttttaccctacgtactgatgcatgtgatgaaaaatagttcgaaattaaattaaagcattttaaactagcaggcatgttactgtgcttctgaatagttgtatcttttttttatcgtgcctttgacaattgcatcgtctatctgaaatggcatatgctttaattactgtttactttaaaaagaaagctgaagaaggggaagaaatgctaaacgtaccaattgttcagtaaaatccagtctggtgaatttcttagccagaaaaaaaaaaaaaaaaaaactccttttctttcatacgtaagccacgacagggggagaaaatgtagttgatgatatttgaaacattattttgtcgagaatttcagtgatattttcttgtgagtatagatgcatataaaatgaattcacattatttttcaaaacgactttgagtacgatttaattttccacacatacaaattcaacacatatctcatctaacatgactatttattttcattttattttttaaaaatatagcataatgtccaatcaattgataagatatagattagtagattatattttagaataaaaaaatataaatttaatgtaactttagataagatattatctctatattttatatgatatttttaattattttttatataattttttctttatttttttttctttccatttttttaatctttttttatttattattagatttatctaacatcgataattaatttgaactaaatctgatattgatattaaagtagtattgttgatatcaaaatttcttttgcgaagtcaatgtttttaagcaattaccaaatattaaagtattggtaaaaaaaaactattaaagtatattcactatcgtaataatcactaatataccaattcgctttttctttataatgtgctcattatgatattatattcgtatttaccctcaatcatatgaattatgatgcagtggttgtatatcttatgcgtgtcctcccccctagctcttttattttctttggttttaaggcgttgtttggttcatgttatgtaaaacggcaagaaagtacttgcttcttgaaaattagggaatcgatttttcaagaaaatacggggaaaaatcataaatatatcgaaataataggatcttatttatagaacaacattgtagaaaatataaatcatgtaaattgtaacttaaaacacatatttgtagaaatataagtgacatggcaaatttctaactgaaattatttatatgcatataaccttaattttttatcgaattaaattgatttttaaaattaaacccaaaatctaatttaatatttacagattattaatagaatttggcataaaatttcttcaaaatcaaaatcaattgctttagaggaagaagattatatttatttattatgatacatataagatcattaatttgtgtattgccattttgcatgtgcccaccgaaaatagatatacttcacatatgttgttacaacaccaatcattttaaaaaaatagtaattaataatttttctaataaaaattgcaaataaaaagaagaaagtttatggataattattagaaattggcgtaaaatatctcgaaaattaaaatctatttcttttagatgaaggaaatcgtatttattcattaggatttaacttacagataggaacatccatgtgtttccgactttgcgtctgaaaataagtacaattcacataagtaattgcaccatcgcttatatcaataaaaagttagttctaaccacaaattagtaattatcaaagttcctataaaaaattacaaacagaaaggattaatatttggctaaatgtgaatggcacttgtgcacagcacatccaacttattggctctcagcctaaataattaaaatgaacaaaaataaaaaacaaactaatttccttttagaaaataaaatttatggatcattattagaattggcctaaaatctgtacaaaatcaaaatctagtgatttagtggaaggaaaatgtatttagttattaggttttaacatataaacatacagatgagatcatttgtgtattttttactttgcgtgtgcttattgaaaaatgcgtagttcacttgagtaattacatctttgattattctaaaagaaagttagttcacaccactttttttcgctgaataattcacaccactaattattaataaataaaagtcatatcgaaagatacaaggaaaaaagattagtatttggccgaggacaataaattgacattgtttattcttctgatttttagcaaaaaatgaaactacaacattaagtattaattatgtggaatatgtatttttaagtaagtcagatacttcttgtacaaaaaaaagtaagtgagctacttaaccgcattgacaattatggattaacgtaagcatttttataatttttaaaatatactaaactaaaagatttgtatcgcttaattgagaagtcttaaaattgaaattcatgtttttgaaactaagattgaggctattaatatctatttaaacatactggactgtttgtttttgcttgaactttttttccctttatttataataataataatgtagaatcataattcgtaaaaatgaagatcgtgtatatatagtgttagaaaatacgtacagtttacaccaataattacactgctgattattttaaaatatagttagttcacactgctaattagtaattaataaagttcttatgaaaaacaaaaataaaaataatcatttaagcggctataaaaattgcaattacgcatggcacataattagcttgcttgcagggaggatctagaaaaaaaaattaggaagcagtagtgagtgctttcgaatttttttttttaaagaaaattaaaagaacaaatcattataataaaagtgtaaaatatggtataatttaaaagaaaaaaaaagataaaattaatgtgtgactaatacttaaaataacaaaagtgtgataattatattcatgaaaattataaatatatatattcatactcacttctctattattttttatctttttattattcttttttcatgtttttaaattttttctcgtacaaacatgtaagttatttttttattttattactataaaaaaattattcaaaattaacatttttaaagtatttttaaaaatttaagccaacttgaaacgtggatccgcccttgcttcctcgtccacagccgaaataattgaaatagatgaaaagaaaatactgtataaactaatttctttataggaaatcgatcgaaatccattgcttcatagaaaggaaattagtatatttatttattaaaatttaaaacagagataagatcttcatctgttgcatttatgtttacccctccctctgcgtgtgcacccagaaaaaagaaaaaaaagaaaaaagaagaagaaataatcagaggtatgctatcatgaaagggacctcaccaaatcaaaagtacaccaaccaaggcaaggcaaatttacctccaagaaaccccaagggccttctcgtcatttcgagaatcccttaactcactcttcgtaatttgcaaacgagaaaaatacataaaaaaacagagattctttttataaaataatataacagaagataaagcaagggataaagaaagcaagacaagaggtcagttagagaaggaaggcagccagaaaggtaacaaagaaagagtctatttttgaacacctcctaattttgaacaatttatcaatattttttatttttctctcatcatattatatttttttatttttttatttctattccgtgttaactagcatttgagatgttgacaaatatttttccataaagaaattaaaataaaaaagttaattttttatttaaaaaaatggcattagcttagagacagagagaggcaggaaagccattgagagaagaaaaacgcgaacacgctgaagacccattttttgtattatttattaagaatatttgagtgtgtgtagttgaaggagcagaagaagaagaagagaaggtggtaccgccttcaatcctttctctctccatttctcatacccatcatcttattatacctcttccatctccataacacccacttgtgaaaaaaacccattaatatatatcacactcacagatacatacacacatgtctctctgagctccaatccaatccaagaccacaccttgttgtgtcggacgaacctcggtttctgtctttttttttttttggtttcattaatttctccgaagagatgcggaagggcagaggaggaggagcctcggcggcggcgttggtggtggcggaggtgaacggatccgttttaaaggagcctcggtaccggggcgtgaggaagagaccgtgggggagattcgcggcggagatcagagacccgttgaagaaagccagggtttggttgggaaccttcgattctgccgaggatgctgcacgtgcctacgacgccgccgctcggactctccgaggttccaaggccaaaaccaatttccctctctcacctttttgctttcaacaccccaccaccgatcctttcttctacgctggtttccacgaccaccatcaccaccaccaccaaaacaacaacgacaacgacaaccttaacaaccctcaaagaccaacttcaagtggcatgagtagcaccgttgagtccttcagtgggccccgccctcccaccacaaccactacgtcgccgtttttgaccactacgcggagatacccgcgcactccccctcttgtccccgaagactgccacagtgactgcgactcttcctcctccgtcgttgacgacggtgacgacaacatcgtttcctcgtcgtttcgacctcccttgccgttcgatctcaacgcgctgccgtttgatgatgctgctgccgccgcgggtgatgatctacgctgcaccgcgctttgtctctgatgattatcgtgcgatgatgatttttaatttctcatttttttttatctcttcaacttgatttttttgttattgctatgcggaaaaaatatatattaaaaaatgatgatcagatgtaagattatgataatatgatcttaattctgtgagaggcagattccgtgttgggtatattattttcttctttttactatttattttttaaatcattttatttgaaaggaaatattgaatgggaagaaaaaaagagaaagtaattatgatctggttgtttgaaaagcaagatgaatttgtgggtaatccaatgtgggtatgtatgtaatctccgatcctcttctctttgtttctatgcatcaatttatcatagttaagaaattcagtgttgctctaacacttagatttagttatttctctttactattttttctttacacttggaaaatcaattcgttattttttggtttggttctttttgccttcattagctgaatttccaatgtttgaatgtaacgccaatttgaatttgattgatttcatgtaaattgttacatgatgagggaaagcaaatgcagctttgccggtaccgaaaggctttttattgtagttttgattatttttattttcttccttacctttatgaccaagtgtaagcaagagcgcttttaaagaaactttgtttggtgagcggagtgattatttgttgttaccttttcttattttgggagcaattgcaacaggaaaagaactactactatcattttgcctccgatggcactcaagctgtttggcagcgtgggttatttagatctaggtgtgaatgattggatttggacgggagaaaaatcgtttctttttttcttcttttgtggtatcttgtaacgtagtaatttcggttgtgtaagaaaagaatcaatgcaatctaaatgtcaccgttaatgtttctgtttctgtttttgtcaagccctgcatatggttaagttttagagcccaatctaacgttacgagtaaaaaaatagggctaagaaaatataatatatatatatatatatatatatatatatatatatatatataatattttcgttcttccttggtatcaaaaggatagtggaatacggtgttaggagtttgaatgatgaagcattaggccaccttgtgttgtgatgtgttgtatgaaggggtgtttggcaagagagaaaataggggtttctttgcatattcctaccccacttaatgaaatgaacgtgacacttctagaagccgcggggatggtaggttgtgtcttgtttttgttttgaagaagcatcaagcatagcataaaataaggtgcaatgttagagatttgtgaaaagtcaacgccagcttaaacacgcactcaccgtgtgaagtgacccttcagaactcaatggaggcctaatgtaatgttgcagcctaaccaaccattcctgcatggccacctaggtgcccctcaccttaccactcattatttccttgtctagtaatcatactcatacgttatatctctctctatgggattgattaacgccacacaacttcttgtagagaaacatcaattggtgagatcttagtaataagttcccaacaaattgttcttctccctttaattgttaacttgtttcacctcccgccattaaaattgagaatttattacatcattttggactattctcatcccagtgttatgtgtgagacatataatcaagcttatgactcacaaaaaaaaacatataatcaagttttattattatttttaattgagaatcttggttgtgtgaaaattgacctatgatgatcccaaatcatacaaaaaattctccataaatttgggttgaaaatcactctataacgcttaagccataaaaagaaaagtaacttgtgctatggctgtcaaatttctcttgtttaatgctatgttttttttacccgtttgtttaatgttgtgtgattgtatgctcaattgctcattaattaatatttgtatatgaaattatcttggatgactacgattttctttttaaataagtaaataacatgactaggcttagatgcactaatattttcccaaatcaaaagaaggaaataaagaatagatttggtgatgggaatcatgttctgaaagacctagaattgtgattagaggcaactcaaaggtagggtaggtattcaaatttgttaataggaagtgtgttagggtttggaccacgtcttggttggggggcatttttctcaactatgtatgtgcctcgtttgctctagtattgtcttaccttcaaattaggggagttgtcgctggcagggtccgcaacacatcatggcctccattcgcatcatatgctctttacttaaagaaaaagaaaaaagaaaaactaagtgggctgattaacttgcctcacaaaggattttgaagcccgtgacatgcttccacataacaaacactgaatgtgaatcaaagtccacatcagaacaaaaaaaaaaactattaaaacaatcaacatttaaaatatcgtcgaagacactataagagatttataaaatactcaaccaaataagttagatcttttacctcattcggtattttttaaggcatcgtagttgcttataaaaaagaataaaaatgcaatagacaatggagacacgaaaaataacaatatattatggaactgagatactacccaattgatcttcaaatattatgcaccacaaatttttagcaactagtaagtatctccttcatacatcacaaggtgtccttaaatacgagtgatatatatgtatatatatgagaggataaaattatatcggtataattttaataattattacatcatttttaaaaataatatgtttttgttgttcaattttgataaaatttggtacatacaattttaataatatatagatataattcaataattggatcaagaaaaatcatattttatatcaagttataaaaatgatataatatttattaaagttaatcggatataatttgattttctcatatatatatatatatatatatatgaaaataatagtgtaattgataactattattttagtttaataaaaataattaaatataaaagatacagatattttaaacttttaatttgaaaaaataatcattgtaaaggaaatattttagtgatgatatgtaaatatcacattgtgtcttatgttaattaaacaaatctgcattgattattttttcttttaatgaataattaattgaaaaggtgtaaataatttaatttaatatggaaaaacagaaaatgtatgtcataaattgaaaaaaaaaaagagaacttatgacatgaatacatgagagaaaaagtactaaacatattatctaactcttagaaaattaacaactcgaatttgttatataagaaatagtaataattactcaaagcacttctttacatctttatttacctaaatttgtaaattaatattttcaatgcaaataaattgaataaatgaccttaggaattataatattctggtatacattttaaattttgctagtctcattcaataatttccttaaacaataataataaactatttcaataatctgtgaacaaatattgttctaatttgaggcaaaagaaccaattaaatacaaattaaataaaaaattacgcatttggtgtcgttttcaaactatttacaaatctggggcaactggttacgcctagaaatgggcatgactggtcacgcccagaaccaggcgtgactaggggggtagtcacgcctggttctgggcgtgaccagtcatgcccagttctgggcgtgaccagtggcaccaaaaaatgggggtgcagggttttcgcggtgttttcgtaaaattacggaaggcgataacttttgactggaacgtccgattgacgcgaaaccggtggccacgtgctcgaaattgagaggagaatgcttagggacttgcccaaaaaattttcccaaacgaggcctctaagtgcctcaaaaatgcgatttaagcttcggagccccaaaattttttttgttttctgatattttatctgctcaattagtgaattgcatgctgtaaattattttttcaattacttcattcaatttcaagcactttgacataaaatatgcctacatcggatattcctacaaaaaattatgactgtttaaaaaatatgctttgatcttcattttgcttctttccccagtttccctagtgttctgattcattcttcttcttcaccttcttcatcatctcatgctcataatccttagagtaatcctttaatccccgcaaactgatccccgcaaactgctctctagaacttgcgaaactaatgcagcaaagcacttgttacaattgtgattagcgaggacattggtcttattactgtccttccaaatcccccaaaaccaaacctttctctcttttctcaatcaatcgtcacgtcacaccacactagcaccattcattactggtaatcatggaaatcagagcccctctctgtctcctttttttctgatattttatctcccctcgaactcgacgtagtgactagtgagccatggtggcacggtgggcacttagtggcgcagtgggcaagagagtaagggttcgagttcgagggtttaggcgcgtgggcaaggaagaaagtagtaaggaagtaaggtagcaaagtgatagctacatggtcgtttaggcgcagactaaaattttacaatttttataaaaaaattcaacattcatataatgtagatttgacgatacttataactttgaacagtcgtaatttttcgtatcaatgtccgatgatgacgtattttatgtcagaacgctcgcaattaagagaagtaattagaaaaataatttacagcatgcaattcactaattgagcagataaatatcagaaaacaaaaaaaattttggggctccgaagcttaaatcgcatttttgaggcacttagaggcctcgtttgggaaaattttttgggcaagtccccaggcattctcctctcaatttcgagcgcgtggccaccggtttcgcttcaatcagacgttccagtcaaaagttatcgccttccgtaattttacgaaaacaccgcgaaaaccctgcacccccattttttggtgccactggtcacgcccagaactgggcatgactggtcacgcccagaaccaggcgtgactacccccctagtcacgcctggttctgggcgtgaccagtcatgcccagttctgggcgtgaccagttgccccagatttgtaaatagtttgaaaacggcaccaaatgcgtaattttttatttaatttgtatttaattggttcttttgcctctaatttgaacatagtgtttatgttgtgagggagcaatagcaagcaaagaggagagacttttggagctctggagattcaagtgcttcaatttaaaaaaaaattctaaaaaattctaccaacatcttatctaattaaaacccatgtaatagagtgactctcactactgatttcttttttagaatttaataaattccaataaattttaagcaacaagggtaaaaaagtaggtattgttgacaattctaaaaaacaaaccgaaaaaaaaatgtcattaatcaaactttactagataagtgttattctttatgatcttttgtttaagagagttactattgacactacattttgactattagcactacatatgtgggtgccttttagcaatatcctgaaaattttcttttgatagaaacacaataaaatcatgattttattgcttatatggagtaaaaaatcaaaacacaatgaaaatatgatttcgttgtatatttgttcaacgaaaacatgattctgttatatatttttcacccataaataacacaacaaaatcatgatttcattatgtattttttttacccccaaataacataacggaatcatgattccattgtgtattttttcactcaaaaacaatacaacttaatcatgttttcgttgtgtaaatgagagtgtaaaaaatacacaacagaaacatgattccattatgtattttgtcaatgaaatcatgtttttgaaatttgttatacctctttttatacaacaaaaatatgttttcattgtataatttttatgaattttttaaattgattttagatgcaattaccttttttaaagcaaacaaattaattgagatataatttaccatttttaatagtaattaatatctttattttaattaaaattgaattaattagatagaagttaccatttataaacataaccagattaattatatgaattacctttattaacaataatcaattcaatttatgatattaatttgtattataattaatttgattacaattaaaaatggagggaaaaaaatagtttgagagaggatggaagacggtaggggtattatgatggagaagttagacttttgactatcaataaattagtttaacaacttttaactatcaactttcatctaacaattaatttttaagctttcaattactttttccaaacaaaacttatgagcatgcttgggacaattgagatttcacaattttagctatttctgtagaaaataagccgtttaaaaataaaaatgttaagaatataacagtgaaaaaaatacttaatggtccattaattaaatgatcaaaatggaacattttcttcttctaaaacatcaaacaaaaagataatagaaaagttatgggtggagaaaaaaaataattttttgttttaaagttcagaaattaatacaatatttataagaataatgaaaaaaacaatatcattaaaattatacccatatatcgtttccttttatttttaaagatttatcaaatcatataacatttagtaaaatttccactatctttgttctccaaaaccctaccactcaaatgtactattgagaacaaattggaattgctaatgttagtggcatatattttgtttcggagtatcaaaatatggaaataggttttcaatttaaattttgctaaattatcttcctccgacaatacacccacaaattttgctaaaatgttttagctgttaaatgaaaaaaaaaacttaattgtccgaattacagttatttgaattaatatttaaaaataaaaaggataatagatagttagatcttttatttcaaggacgtgcacgtactgatcttcacctaaaatattagattcttttttattaaacttaaagctactaaataaaatatttttgatatatttatttctgcatgtcttcctaatttttattttgattctgattattgattgatgtaggtatcaaattgtctatcgcgattaggccagtggccgacctctcctaatcccctttaaaatagtggtatcaaatcatgttatataaaagcatggattttactttgatagattattatattataacaactagtattttaaaagacctctctaagtgatttgtcaacacacgattcacggtgaaaaaaactttaaacaaggatcaaaattagactcaaactctggcaatggattcagataattgataaactaaatctggtaagtctaaaaggcaaaagttctagtctaattttctgcgctttctacgatccaattgacattaacatcggccaatataattaattacgtgggggtctaactgaaacaacgcctagtatagaagaagtttagaggtttacagagtcttacatagaccaagaagtcgaggacacaacacattattaacacaaaaccaagtatccacaacctcaagaatacagacctcacatcaaatcaaatatctctagtttgccaatgtaactaaaacagtaaaggaagatgaactaacagcaagttagatcttgcactatagtggtccgctggaaataatgtattcaaaaagttgacttttagttattgccaagcagaaaaaaccaaaaacattgaaaacttcctgctgccttgtgtcattgttgtccaagttatttaacattaacttcctcccagatatgctgagatgggaaaaaaatgtatagcatctgtgagttctgaaaattaggacagtattatgcatacgacagaatcttttaaactaaagcctaacataacaaatgagttaaaaccagcattctttggttgcaatttcttcctgcagttttatggcggaaattagggaacttttttgtttctgcaaggaactgaccaggacatgaaaaatttccagaacattcaagcagatgcagccaaaggcacggatctgtagcatgctctctttgcagcacgaacaatatcttcaacctgtacatccacatataccaggaagcaatcaaatttaaatgaaggatagacatgtaccaaaaccttgaacaaattagcatctagtatcagcatacaaaactcatctcttacaaaaccattaactcagggcatttcacccattcaaaatagaaatacatttctggatcaaaataatgaaaacaaatcttccaaatcatgctgacaaaagtcacagaaaacaattaatatttaagaaccattacctgtgggacagccattctttccagatttgctgcataaggcatgggaacatcagccccggcaattctctcaaccggtgcatcaagataaccaaaactctcctcaatgacagatgtgctgtgcaagagaagtacacactcgtatgattgccaagagttaaccagtaagatacattcacacaaaaacacattaatgtaaagagataaaccagatttcagcgccaacgccatgctgaggaaacccttcttcaactgtcaccagcctgttggttttcctgaccgaagtattgattgtggatcgatcaagcggccggattgaacgcaaattaatgacctatgtggataagaacatcacgcaccattatcataacccaaatgatgtttttgcagaaaaggggggaagttcattataaactaaagttttacctcagaactgattccttcctttgccagtgtctcagcagcctaaacaccaagagaagagatatttaagaatgttctctactttggtagtacagaaaggggtcagagatttcaattttttttaaacaaattataaaacaccatataacacatcaacccatccagaaaaaaagttataatcgattcttgtcttatcttattatttaatatttaaattaaatgcaagacaaacctatatctttcacatactttgcagcaaattgaacaaacaagacaagtgaacaacacataatacatattacatatttataatacaaaaggatctcacagtaaacaaaccttgagagcatagccaaccatttttgaataggctgtaatagtcacatcttttccttccctctcaatctgtttagtggtaaaatgaatgaagcaaacaagaagtcaataagaatgtattattgtgtagtaaatatggctccaaaaatcataaggggtatttaatatacgacagataattaactacctttgcttttcctatgggaaggcaaaaactggaatcaagaacttcggctgaaacagggaatgactcaccatatctagaggacataattcatcaaattaaatattttttgaaacaagaactgatgacaaaatctatgactactcattttcatgtacaaatcaagcagcacaagtgtcttttttggggcgggagaatcaagcagcacaacttacaacaattcattttcaaggaaaacaacaggatcagggtcccttatagcagctttaagcaaaccacgagcatcttcagatgaatatggtgacaagactttcaacccagggcatgaaccataccaagatgcataacactgcataaaggcaaagttgtggggcatacaaagacgaaacctgaattatttatcagttctcaaatggttaaataaagtttgtctttaaaagaaagcagctaggagaaccgtacttgagaatgctgagcaccaaccccagcagcagcaccattgggtcctctaaagacaataggtacggatattttcccagcagacatgtagtttgattttgcagcagagttaataatatgatccattgcctgcaacaaaggttaaaactgaacaattaatctgccattacacatgttcacaaaatattcttcacagtttattagtatttcaacattcaagctaccaaagctcaatattaagattgtaaacataaaggcttacttcatgcagaagaaagagatttcatcttccaatataattcatacttaagaataatacttgaacatagaagcaataggagttgacaagtaacaaaattccagcaaaaaggcctgcctggcgtctaacaaactagattgatttgtatggcatcaatgtgatgttcaaactaatagttaacaataaactgaatcccaaccacaaatccttagttttatatctttaataacagggtagtcaatcacagaaattcacagcattttgtttgttgcccccacaatgcacaaagaatcacattggattttgatagagcaaacatcacaagcccaaaacgtgtcaaatcacgaccactattggggatttcgtcatgtgcccggctgatttacattgtcatatccaccatgcctccccctctagcttgagcttcatcattttttttctggccaaaggacccagcagcatgccatttactgcgatgcattgttttccatcacgccccctccactctctagtttgaggttcaccattttccgttgctgtcattttccagcaacctgttggtgttctacatagcaactcccatcctgtcacctcagtgagcccttggagacaccctctgttttgtttagttgttttgtactttttttctttttgtgtggtgtagctagcacttcatagtccacatggcattattcctccaaaaccttagaggctcaaacttattaaggtttggcactgtactttttatatccttatgatcctttgttgttattaacttgttaattatgcctaacatttgcaatttttgatgattgtatatctagactatatcactataacttttgattatcaatgacgaaatgtttttcattgagtaatttttatttttgagcatttatgtatcaactgtaaattaattatctcatttatcttgtatgtataatcttcagaatagttgctatcgtgctaaaacatttctggggttggccacacacatctatatccttgattgataactgtgattatcaacacagcctaacagggaagtcaacatttttccttgtgaagtgaatcatcatgtgttgaaaacctcataaccctggtattcttatcacacagaaaacaaaactcatacaatgccatctaatatcttcatgggcagcaagctttacataacattgtacatatacataaattaagtggcactgctgtaaaaaatatatcacttaagttcacactcaatttaagaaagaaaggatgcaatcaagataaactccaacctgcatggagaagttaaaagtcataaactccacaacaggccttagaccatagtaagcagcgccaactccaatcccagcaaacccagcctgtattatatttcacaaaaaaaataagtcaatccaacagctgcatccaactataaataaatcctgttcttattttcctatcaattttaaagtgagaagctgaaacaaagtaaattttggcgttcaataagcaatctattatggaaagttagaagcagctgctaagcatgaagaacaacacagttcgaaggaatgcatcccaaagccatcaccattaataaatcaagtgaagagatgcaaataaagtatgaagtaagaaaagccacctcagtgattggagtatcaagaaccctctcggggccatacttttggagcagccccttggatatctagaatgaaagaaggaagaaagttaagttaatgaagttcttaaaaggagaggttggcaagacaactaaactaaccaaccaaccttgtatgcaccctgatattccccaacctcttcacccatcaagaacactttaggatcagctgacatttcctcgtcgagtgcggagttgagagcctccctgacagtaatctgcatcgaaacaacaatggcgagtttgatatttgatagtaagagattaagagattagagatgagaacaataatgaatacctctttagatgcagaagagaagtgtctgattgcggagaaagcagggcgaatactctgcaaataaaataaatcatatgaaatgtaattggaataggaatcagacttcagacacagacagtaccttgtgccttataacacccaacatcttgcttccttccttgatcttcaatcaagcaaaccaaaactagttagtcacaaaacccgtagtaatccatcaacaaatttcttctttttcaataataatattcgacaatgaaatcaaccaaaccaaatcaagcaacctttattctttttctttttttattattcatatatctaacaagttaaggacatgtgtcagcaaatgaagatatgtcaattaagaaattttcctaggtcaattaagtaaaaattaaagttttaaagactaaagaggttccttgggagattcggttcgtttagcatccaattatccaaacaacttcaacataatttcttactattatttatataatagaatcttacgctatattttttttcataaaaataatcttaccttgtttatgatgatgttaagcgcgtgtatacaaaatataaggaaataattttaattttttgtagagtattaaataaaaaaaaacgaagaatatagtggtgtcaccttagaagtttttttatgagataaatgaggatatataaaaaaaagtcagaagatagaaatgggtaccaattaaaagaattatcctcaaaatagtcaaattaatataaaaaatcttaacaatatggatcaaaataaaaaataaaacgaagaatagagtggtgacacgaatttccatattaacgtgaagttaacatgacaaactgaatcagcaagcaaaggtgagtgagtgcgaagtgcgcgacaaggcgtaatttggcgcatttagatgaaactcacaacttcaataacttggcactatttttacaagaatcgttaaagcagcatttctgcgccaactctgtctcgttagtttccatcgccaatacgacaccgctaatgcaagtcctcgtcgtcgtttaacgcttacgttttctgttccctgagaaggtaaaaagcgttcaaacgcagcatctcaaacacgcgattccgaagcttttctgcgatcaatggagttcgacccgatcccaatcggttcgtgctccaaagaacaccagacgatctataaggagtggttcaattgcgctgattcaggtacagcacagcatacgtcatctttcagtattttttttttgttccaattttatattgtctgttccttttcatatccaaaaatttcaccgtgcacttcgttttccagatagcgatggccgcattacagggagtgatgccaccaagtttttcgccatgtccaatttgtcccgcgaagatcttaagcaggttttctgttttcccgttttttttttccattttctttctttattgtcgttcttttgtattgtactgaatgaatgcagataggagttggaggtaatcggaatcatgtgccaaaattctaagatatgattgcttggttaggggatgaagttaaaagtgataaaagttgggcattattaacatggcctaccttttccttcttattggttttcctcgttagtgaggtgaaccactgattgcctgaatcaattgacatatggttgtttccaacttaattagtgttctcaaatttgagtcctgactattcaattgcattaaatattcatgttaaattttctgccgatagtaattctatctagctcaatcaggactaccttacatgaaggatgtctgttgtctctgccaaaatatataaataaataaataaaatgcggtgaaattgaagtgtacatgcaattgtagaaaagagataacactgggattctatggttttacaaattggccaattttggtttaatgttcatttatttttatctcattcatttcaaacaatataaaacaaaatgttgtttactttcattttttatttgtttccttctctgcctttgctatcaagcatgcaatagtgaactgtgaacttcctttatccttcctatcttaaatccctcttcaatttcactttgcctagtcaaacttagttgctggtcttgaatcgggttgtcctttgatttgggtaatgcctcttatattatccagtagctacattggttttgatttttgcaattcagattcaaatctgatgcattgttggtatagagaattttatcatgttattgaagcatattgtcaactatttttgcaaatgaaatattttttaattacacttatgatgtgacactttatggtttcctgatattgtttattttatactgataatggactaattttgaactcttacaatatatctcatgtagaagttgcctttggtactgtattatctataacaactgaaatggtttgggcatttcatggttgtgtacttgtgttgttaatataatttgttgtccttgcttataagtatctctgttggcttctttctttctgctaactaaagtgtttctttgtttgcttctgttaccaaaataaggtgtgggctattgcagattcaaagcgacaaggatatcttggtttcactgaatttatcattgctatgcaggtaaaaatatgttatgctttttttgaacttcaatgctgataaatttccaaaatcttacacatctgaagtgtagctagtttctttggctcaatctgggcactcaataacacccgatctgctgactagtgatggtaagtaatgtatgtttaggtttgtcttctattactttgtttgaataacttcttataattgtagcacattcttgttgttgtgcctgcttacatattttgatttgattgtgaatgtcttcttataaatttaatctaatggaagcttaacttttatttcagttgattttacaaatgtgaaacctccctcaatggagggtttggacgtattactagctgtaagtatttctttttaaggtctattttttacagtgttaacatttttatgcttatttagtgaaagttctgaccatttgacgttatttacccagaagaaaaagcataaacaaaaagaggttgatgcaaatggtaatatatttatcgttttactcaatatggtgtttcatattgattttattttatttgttcttttcttctaaaaatctaagttcagcagttagcaataatgcaggtagctctcaattgcagccatcaacgtcaagtaattggttttcttcaaagtcaacaaaaaaggcaagcattctgttactgttactttgattgatttcgtgtgcattatccttaccatccagtccactagaaaacttactgaatattcatttcaagttttcaactaatgggtaatggccaacttgattgtcattctttactggctttaggttgttctggtttcgtttagtgttttcttttgatcttgcagagtatatttgagagatttctggttatgttgttctctgtcttttataagatgatgaaacaaatgtgtttaagtaattattaggggcctgaaaccagccttattatttaatttcaatgcgtgtgtaactgatattattagccaataatagtaatgtgcctgatactacacatgtgaatattgttgtgtcaatctagaattggtattatctaatttcttctttttgacttaacaaaatgtgcattttgtctcgtgtcaatctaaatatctaattttgtctctaatgttatatgaatcaagttaatgttaccctaaaggtcatcctatagatatgttctctaggaccttttatctgtatttgttacctctttattattgccagttctttaaaattgtcaaatattatttttgttatgtgtttttacttgtatatgtggtacatatgttcataggtgcctctttcctctgtgacatcaataattgacggcttgaagagactctacattcagaagttgaagccattagaagttacttaccgttttaatgattttgtatccccattactggtcagtaagttattttgtttagaaatgactagctactccagatttactgccacctttctttgtgcactcatgttgttgctatgctttaaatatctacaaagatatacaattagttttgttattgattgtaattctttacatattgtagacaaacagtgactttgatgccaaaccaatggttatgcttttgggtcagtactcaactggtaaaacaacatttatcaaacatctgcttaaaagtagttatccaggcacgtgattctcctttcactatatccatatatgtatttctcacattgcttatatctgttttatgaagaaataattttaaatacatttatttattttatttaatattctttgtaaaattttaggatgatataacattttttaaaataatgttattaatctttgtcttgtttttcccataaatgttgataagagcacatattgggcctgaaccaacaactgataggtttgttgttgtcatggtatgtgtaagccaaatcaatttatctcccacgactctctattaccttcaatgtttccttagttttaaactaataaatcaatttgacttctaattgctggcaagactaacatcttggtggaagctatgaagcatcaacactgctatttcttgcagtgtcggagtgtcagtcatacttccaagttccaacactagcacttctttaacatttgtatgacatgtgttggacgctactaaactggtgtttaattaattttttgttgatggcttggacatacgttacacatggtttggtcattcaactctgtcaactgacacctaaatatggcttgagacttcaaaagacaagactattttataaatttgaaaaaatgttttaactttcagaaatcaacttaaaatataaagaataatataaactatttaaaagatacaaaatgctaaagaaacttctttagggaaaatgtaaaatgatgcttcttaatattttttttgtgtggggctaattatagtagggcataagtaaagcttaacaagttattttgagagggtgaatataaattcagattctcaatttagatattttgtgatgttaatcttttttaattccatttgacatgcaaacgctcatgctcacacatgtttaggacattgccctgtgtttgtgtgtctattcttcataacatgaaaattctaaaacctggcaatggaactcagtagttcgtaccatagcattagtgccaagagttgatggtttaaattattttcttaataatcctttaatctagtagtcatcttgaaaatgagttattgcattagttttatattttaactagcaaaggatgctgatgtacagtctggatctgatgagagaagcgttcctggaaatactgttgctgtccaagcagacatgccatttagtggtcttacaacttttggcacagcatttttgtcaaaatttgtgtgttcacaaatgcctcatcctgtaagttgatctagatctgttcaaaaagtttacgagatttccctttatagcatttagaattgactctttcaattgtccaaagctactggaacacatcacatttgttgacactcctggagttctatctggagaaaagcaacgtacacaacgagcatatgattttacgggtgtaacatcttggtttgctgctaagtgtgatttgatactccttctgtttgatcctcacaaactggacatcagtgatgagttcaatcgtgtgatatcatccttacgggggcatgatgacaaaatccgagtagttttgaacaaggcagaccaagttgatactcaacaagtaagagcttgtgtagtcaaacttctgtttgtttatcttttgaatctttcacaacctagtccggtgaaatcttaacctatattgggctctatgttgcagttgatgagggtttatggagccttaatgtggtcacttgggaaggtgctgaagacacctgaagtaatgcgagtgtatattgggtatgtctccactcaatgttcaagtgttgtctttgttatggagggtgggggagagactgctttgtttctccactctcagtggaagatctcttccacactgccttccccatttgctatgcaattagacataatataactatatttatttccttgtttatgagattgccatgtgctcatttgctcataattaaccttctttatggaagctccttcaatgacaaacctgtaaatgatgctgccactggtccacttgggaaggaactctttgaaaaggaacaggatgatcttctctcggatctgaaagatgtaccaaaagcagcttgtgatcgaagagtgagttatttatttaactaaatttattttctttaataagaatagttttccactaaaatgaggttactttgggtgtgtttggttgtgtttttggtttagtttttaaaaactattttttaaaacatttttcaaaaactaattttcagaaagagtggggaaaatgtgaaagtgcaagaaagaacattagtaatacaaactgaaagtaaaaaattgaaacaacttaaagatggacctaaaaaagagttattagttttgaaaagagtttaaaaaactacccttatataccatagttttttagtgtcattagattgttttctagtgaaactacaagaaagtcagcgtatcgattagattgttttttcttttgtgaaattaaaaattacgaaaactaatgttatcagctcttttagtgtcatccgcactccacacacaagtttgatacaatagtctcctttcctatggtataaattctacaggtgttttttgtaggtgactatctcgtatcttcaatttcagtgcccagtttatatttaaattgttaaagttacttttttgcataattaatttatcatttgtatatattgactgttatagatcaatgagtttgtaaaacgggcccgagcagccaagatacatgcttacattatcagtcatcttaaaaaggagatgcctgctatgatgggcaaagctaaagctcaacaaaagctcatcgataatttggcagctgaatttggaaaggtatgaatctgtgtacatccgttttgcatatctgcttgtctctgacaacacttaaaatgtatacacatgactgacaactttgaaacaggtacaaagggagttccatttacctcctggcgattttccaaatgtagagtttttcagagagagattgagtggttacaatattgataagtttgaaaaattgaaaccaaaaatgatacaagcagttgatgacatgttagcttacgacattccaaatctcttgaagaattttaggaatccctatgattaaatttctgagcaattgagtcagtgctataattagattagttaagagtgacatttgtagcatacaatttttacggggtctttatgcaatgcatgtgcgtcatgagatctttatgtaccatgcgtccgtcgccgttcttttctagtaggaagttttataattccatatatgtttttgtatttatgaatattttgtcatctacaatcaagtgtcaagacagaaaataaagacaaaacacaattacttgtttgcatcaagcccgttgtgtttagtgtagttaaatttaatgattaacaggttggtctagtcgtcaaggaaatgtattgctttggtaagtttgaatcttggattagtacctaatttttctaattaaacctgatatgtgagagtacctccgttagtcagttcactaatttgaaatgatgaccttgggatatttttgtcacataattgaaatattgaaataatccgttgctgcatatatactcattttatgtaagtaccgagtggccaaatgacacaactacctacaagtcgaatttggttaaaatagactttttgggttttgttaaaaccatggatgatgtcgactttcatgtattcttattcccttctaactcacccgagctgctgcaagaataatgtaggaatagagtggacccataatcatgagagttcggatcaaacaatttcatctaaaccattactaaatagtattacctagtgtttttcaactaataagcattattttcgaaaattgctgggaaacattctttgtttgtatgaaacttatcatacatggagtaagacttagtatattctaataaatttcaactaaaacgggtatgaaagtttattagtggccattttttttttgtcataactgaaatatataaaggaaataactagtaagatctatttagatacaagttacaagtgtttttaaaaaaatttctattgaaaatatatattttttttcaataaataaactctcaaaaacacttataacattatatccaaataaaacctaacataatttctaataatttttttaaaactgtatgttttctcctgagatttgactcaatttatagaaaataacaaaattatgggtgagtcattaatagttggtgagacacattattatcttcaatcaacaaacttaaacaaattggagaaccttggttgcaccattgtgcatgaagtggatgttcctaccatgaacaaacacccgctgctccgaaggaaatattttgatcgcactgtcttcaattttccacatgctggttttgtttatggtgaacatgatccgtgccagattgagtaagtttataggaagaacaatactactacaccaaatatggaaaacataaaatgttttataaacacacgttctgagaagatagatggtaagccaaaatggagaaattcacatgacacccaagaatgctcacccttttaataactgagaagtagtgacactgacagaggaagcagagttattcttggttgagaaagtgccattttttagatgggactatccaggttacgtaaataagagagtatccggacccaaatgcaacaaagcttttcgtgttggtgattgtagcacctttaaattttccaaggtgcgtgacatggaatccatgatttcggaggtgccaacatgttcaatttgaaggacaatggagtgctgcagcttgttagtcgtcgtcttcttttaggaaaaacattttcggctctagtgaaagccatgcccatggcccatggtatgctatgttctctaatacacttattcactacaaacactctattctattgttttgaacttttgctttctatcgttgttggataaaatgtagctattactattagtcatgatataattcggtttggttgtgtaaatttaggattttattaaaatatttacctgccattacgattacgatgcatggtagagaaaagggtaagcagagtaattgtttaacatagatgatattcataacaagtgccgttggttaaaaaataaataatcctcctaaaacaaataatcttaaataattctatatttttataaataaattttcattcctaattttgtcaatctctttagagaattttcgttaagtatgttatatgtattatttctttttaaaatagtgatcattataaaaaaaattattcaatcgtttttttttttaaatttgattgtcctcccatgaaaatttgttaatcaatttttttatcccatcttgtttagaatgttattgagattttttatttattcattttcaataaatcttaaacaataataataaatttaatggctatgcagcgagagatatgaataggtgttaattaaagaaaaatgtgctgttaacaatcctcccagactccagttaaaatttggagatgcattgcttaatagaggcgacgtcgtttataatgaatagataacctcaccaatttatgtttttctctctccaccgtgagcacagactttgctgttctcttttctctgtttttgcataaacactctgttctgttattcgacaacttttcttcttcatcgtcctcaacgatgttggttcatagggttttgtcccgtgtttccaccaccattttccgaacctctctcctctctgcttcgcaaacaccccaacacttgtccaccctctccaatattaacttacattcccttcttccccattcacccaacaaggtgctcttccacactttcccaaaatcctttgatttcccctctttttttggttttagggttttgccagggtttaaggaggttgctttttaatttgactgttttagccgtttcgctatttcattcgattggattctgttcattgatttttgaattcagttgtatttttgaataatatattaccctttgagctaagttgcctagaattttgagtgatgaatttttttaattaggggtcatgacagattgtgtatcagaaattcgtaatttatgcagtttggaataggttgcattatagagtgttacccctaattgttacttttgcacctcttttgatgctaatttatctgttttagctattggttttgaattcaaatgttcagaaattttatttatgtcattttagggtttaaaaaaacaaaatcaggatgaaatgacgtctgtcattttgctgctgttcacttgattgtccatttttgccaggtttttatcaggtgtgttgtgttttattacattaaaagagaaaaaatgttataaaaagtgttttctcttgtgtggaaataagtatttaatgaaaaaagtggtcgatgaaatatgagtgtaacttttttttttcttgataaagaacattatgcctgagcttttgtattactatgttatgtcctgtcttctaaattctatccaccttctcattcttgttcactgtcatttttttgaaatatttttcctaagaaataccggtgttttaaattccttgtctgtacgaaggaacaataggttccttaaaattttttgttcttctgatgtagtatatgatactatgaaatctgatttatatggtaattggtgactatcattagcctattttctaggattcaattatttttatctaatgaattttagtgatgcattttaaaattctcattaaggttccaaatatgctttctaatgttccaggtgattcctgttcaactcaatttgttgctgccgccaataaattcattattagctccaaaatttgggttttcttcatcagcttcaaccgaaaataatgacaaggaaaaaggaaataatgtgcataatggagattctacaaatgatgaccctgcaaaagcaaatgaagaggcaaagaataatgatcaggctaaacaagataaatctgcagataaaacagaggaatcaggttctatttcagattctcaatctcaaactgtcaaaagaaggaggagaggttttaaacggactgcattttctgattcagattcagagagtgaaagtgacttatccagggatgatttaattaaacttgtggttgaaaaggaagaacttgtgacgttaaagcacaaggagattgaaaaaatgcaggataaagttctgcgtacttatgcagagatggagaatgtcatggaaaggactagacgtgaagcagataattcaaaaaaatttgctttacaggtctaactttgatcccttttgtcccaaatgatttcctcttcaactgtgttctgagtggtttaaatatgctgtagaattttgcaaagagtttactggatgttgcggacaatttgggaagagcttcctcagttgcaaaggaaaaattttcaaaaattgatacgtctagtgactctgctgaagcggtgaaactcctgaaaacacttctgcaaggtgttgaaatgacagagaaacaattatcagaggtagaattgttatactttatgttttatctgtttaatttcaaaagtcatggctaatctattatcaatattttctttctactcatttttatattaagttttaatccccatttcttttcagctatctaagttcctcatttatatagttttgtttagtaatgatagtcgattgatggttaattgagtgaatgtgagggtacggtaaaagtgatttggagggactaggagtagaggctttatgctcaagtttgaggacatggttgttcaggtggtgcgagattaggggggcttgtttttatttctgtgttaaatgatgtttgtttttttttaaaaaaaaaaaaatcatgaacatgttggaaattattttcttattccaatttctcataactattttatgaattgttattttaaaaaaagaataattattttgtactgaatgcacttgatttacagtggcttgatagtaaattggatatttagtttacctgttgaattttgatgaatagatgggtgtgttgggaactggggaatttggggaatgactttagttccttcatgtttcaaactcaacttataatcatactacaaaagttttttccagttatattttactatgagaagtacactttctaacacactgtcttattggcttaaatttgtcggaaatcacaaaaatgtttaggttccactccatatttaatgaatctcattcatcattttgtagttttcaataaatttttatcaataagagtgagtgtggtgccactcctcattttactatacaatatattattgtatgcttgaaataatatgcttccttagacattaaagtgcttcaggcttttgtaaaactaattgcttccgcttacaggtacttaaaaagtttggtgtagaaaagtttgatcctacaaacgagccctttgatccacacaggcataatgccatcttccaaatccccgatggttctaagcctccaggaactgttgcagctgttctgaaggtaatatacagtggaaggactgtgattcaatttttccaattttaaaatttgttttgacactcaaaactcttgatgtgctctctttgtctatggtgcatgcttacttgaaaattggtggcatatctatatcatattcatattcaacactgttacttttatggtaatattgaattcgtatttttgttgttactatatcttttctactgagattcaaatccaagtcatgctctcaacttctcacccttcaccttccagcaaagcatttctcactcttgctatcttaccatcctcagaatcatcacaaagaataacaactgaataaatttaatttagttacggatataaaaatattaatatatattaccttaatgtattttaatttttttataaaataatcctatttgcttactgggagagctagcaacacttttttaacgtgctttctattattcgatttgtttcatggtgtcattaaaataactctggtccctactttatttagtgggactcgagtgcaactcatctaataataaaaggtgttttgcaaacatttctcttgcatatcatattgaatcgtgttggacatgcaacacagtttggttaattatctatatattttgcagtgcgtcaagttctggttgatctttgtcagtgtttatgacaaagctttttgtttttgtaacccaatcatctgatacttttcctgaaggaatgtggtcttattcttagtgttgttgggcagattatttaggagattgaaaacatgaataaaaggctatcttatggttgtgtctgcaggcaggatatatgcttcatgatcgtgttattcggccagcggaagttggtgtaacccacgcaatcgaggatgaagagaataatggaaaagatagctgagtggggcactttcaaaatgtgtgaaatggaacttttgaagtaagttattgcttacaaatatttgtcgtcaaaaggggtatgagaaaatgaatggtacaaccgtacaatatattatctgacatttttgaacctttcattatttgtttaaattttattttaatactaatatagattttttttttatttggtcaggttagcatgaaatttttttccgtgagactattattttatattagagtaaaatatgtttttcgttgacgtaacattatcaaagtttgtttttgttcctttaaaatttttgtccgttttttggttcttgcaaaattaaaatgtgacttttcttcacctgccccgaccccgattaaaaaagtcgaataattcttgaacctgaattcatattcgatcaacttagatatttcctttcaaagtcggaacgcgtacccacgactatgaatttcattgtgatgcctattcatcatcttagaattattaataacagttctaaattgagaaaagaatcaaatcgaacaatatttaaaagataaaaaatcaaattaaatctaaatgataactttgttaacttttataagattaccttaaaataccaaaaaaacattgttttgtattatcatttcattaccattaaactactatctaattgaggttagagcttcaacaatttttttaagcaactgagagtaatatttttcttcaatattggtatagagtattttgtattatcattttgttaccattaaatttcatcattttttttaatcatgatattgacataaactattttattgatgattatttccgtcaaaaaaattaacttatcacttttaataagtttctcttctcccaatcataaaactccaacttgagaccttacatacactcatgatgtctacttaaacctttatgacatattcctctttttatctccttttatttaattttttatagttatttgttattaaccagataaaattgggtattataaaaaacacgtggaaacctatatatctcaataaacaaaatgttgtacatagagaagaaaagataatggtaaacacgtacgtgccccaaaaaacaaatagcagaaaacttgaatttgatttttattaattactctccaacaaagaagagtaagacattttagattgaaggtgcaactatagctaagcaaatttgttttgtggtcaagatcagaaattgcagggttaacaatatctgcagaacgcaagtcttcctcacatgacaaaggtccatcaccagcaattttggcccaatggttagcaattcgaggatgggattaactttctacaccattcatttttccaatacacccaacatgcacagtgtaataccaattttacccttctcataatccgtaagttgcataccaacatacaccattcaatttcatacggatcggcaatccgtaagagtcatacggatcgacaatccgtatgagtcatatgcaatctatatgactcttatccatatgcttcatacggattgttgatccataagagtcatatagattgcatatgactcatacggattgccgatccgtaagaggcatatggattgacaattcatatgcctcttacggatcggcaatccgtatgagtcatatggattgccaatccatatgactcttacggatcggcaatccgtatgagccttacggattatcaatccgtatgagtgtttccaactacagtaacaacgccagaacttacctccaatgacgattccggccaacgaaacctccacgactgctaacaacgacctccacaccaaaccaacaagccaacaaccaccaagaatccaagctagaaccaagaacaggagtgagaaggaagacgacgcattcagctggtgtatgcgaaaaaaaacaaagcaaaacaaacaagggcaatattggcattttgacaaaagtgttgggtgtatgggaaatttgtccgatgtgagaagttaaacctttcgaggatcgcctttcaacttacccaatgaattcctaaacgaatcaaccgtacttccatagtaaaatgcacatctttcaatagcgggaactttttttgtcgtcgaattcgccaatcccgtaagatccttttcaccttaatattccctttttccagcccaactccaagattgcctctgcaagttcaaaaaaatttgttgcactcgggactttaggatctgctcttagaagattcgtgcatgcaatcttgttcggttggttttcattgcaaatttgggcaattaggacgtaaccattatgaagatctctagcatttgttagcgaaggagactgagcaatgaggaagaagcaaagggtgaacaacagggaacacagtgctaaagaattcattttgtggtaggaagttgttttaatcaattaaagggcaaggtgttgccttcttttatagtcttgctgctaatattccacacttaatgcgttatattatatatattattatcattaaattattaagatttttataagattgatggaatcaaaatgacgatgatttaactctaaaaatgttacacgaaattaaaatcgttgatagaaaatgatcttacgttttatattatatatgtctaatgcagttattacttagaatccaaatatttattgtgttatcatgtaagcaattaaaatgagatttagatagatgtttaactattaaaaaaagagagagaataatatatttgacttgttgaccttatcttttttataatattatatttaactatataaataaaatatccaaagcatttattacttaggatccaaatttttattgtgttatcatgtaagtaattattatgacatttataacatttagatagatgtttgactattaaaaaaaaagagaatgtatttgactcttgagcttgtcttttaattaaaatataatattcaggaaaatattattactttattcatccttaaataaggaatattttgttacattttactatatttataatattcaaggaaatatttctaatcattaaattctatctaatgcatttattacttaaaatccaaatatttattgtggtatgatgtaagcaattaaaatgagatttagatagatgtttgactattaaaaaagagagagaatatttgactttttgagcttatcttttttacttaaaatataatattcaggaaaatattcttactttactcataaacaagatccttaaataagaattattttgttacattttactatatttgtaatattcaaggaaatattcttaaaatactttttttgaatgcataatttctaatccttgaaataaggaaatactttgaaatcgttaaattatattaatatctttataatattatactttaaagctacaaataaaatatctcattgcgttcgtatttattattttagaatacaagtatttaacgtgttttcctatagtttaaccctttttttagtttaattttttctatttacaaaacagaaacggagtgaaacaattttcttaatattatttaatcataattcataaataattgtgtatgataaaatttctgatttttatcataattatttcaaaaattatatttaaaataatttaattaattgataatgtactaaaattatttgaattattgaaaaaatatttttggagtattataaaatgtttcatttaaaataagtcacagtttgtttgttttttcttcttctgatattcacatttattttcacaacacagttcattgcccgattcattttgctttatattttttggtagcaagctatcatcataactttacatattacttacaagatataatattttgttataattctttgaataataagattatggaaccttacggtaacactaatgttatcatcttaattaattactatactcaaaatctatagtaattaacaaatatataatatctctttaattttttttaatatttataaataatctaggcggaagtacaaactgaataaaataacgtaaattaagaaaacagtgaagcaagtaaataactatgtctttgtcagaggatattcttaacctagagaaaaaatcacatcaagattactatatatgtgaatgtgattagtttctttttattttgtactctgtgttaaagaatcatatacttataagtagttttaaaacaattcaaatatttaataatcataacatgattaaaatataaattaagatgttaaaattaaaatcatatatatagtaaaatcatgatcaataagcttaaaaatttacaattcacatatataaataaatataagtatatgaaagattaaataaaaacaaattaaaaaaattatcaacatttaaagatgcttaacatgaaaaataaatatgtaaaaatggtaaatatgtataaaaaaattgcattaatgtgcctaacatgattcatataggtatatatgccttccagtaagctctgcatatgctactcttgtaagttattttaagtgtttatgaaaaaagtgaaaaatatcttagactaataggaagatatatatttgtataattttttaaaatactctcacaaacaatattaatctaaacaatttgtttataagctcttgtaaatgaaatatagataaaaaaagtctcgtgaccttttaaaatagtcatcatgtgtgtaattgtgacacattttttttatatcttgatacgttgtaataaaagttttctcacttgatatgtccttctatatgaattaaaactctcttgttttctttttcttcatttcatatgttttttttaaataaataaaaggaagataatgcacccattataaagactaacaaatattttctttaaaacttgtctatatatgtgtatatatatttatagatgtacagaaaaagaaatagaaaaaatcataatcctttatatatatagatgatatatatcgaatgagaacacttcatattatgaaaataaaaattataaaaattgacacacacacatatatatatatatatatatatatatatatatgttagtattaataatttaataaaataaatatgttgatcgaatgcaaatataaatacgtcaaaagaagattaatcaaagatattattattaatactataaagtatatatatatatatatattagtaaaaatatgtgcaattttgatttttattgaaggtatatatgtatttatataacttatatttatatatgaaaaaaatctattagtgtagtgttgtaagtattttgttttgaattttgatttggaattctaatctttatcttttttattttgtcaattttttttttatattttcactcatcacatcataatgtatttactttataatcaaagcacataccttttaaacatgtcattttcaataataggtaatatataatatttatatattaaaatttatcactatattaattacacttacaaaaacatgtcaatgccaataaattttattttgtgacatatttcattatcagacatggcaacaggatgggaggggacaaggcagggtagggatgggtattgcctcatcagtcctctatcctgactcacgaacatatcattgtacctgtccttgatatttgataggttaaaatttgtttccccattcccgtacccatttggtatcgagtatccctattcccgccacgtcttcaatttagatttgtaaaataagtttttttaaaaaaattatattaaaaatcaaattttaaaaaaaataaattgattattacacatttatttttaactacttatatatcaacaaattcattaaagggcatttgtctacaaaaaataaattgattgatggtactaggactggtataggtataggcagtggcggatctaggaccctgggtcaatgagaacaatttatttaaaaaaataaaaattgataattatcattatcatacacatgaagataaagacaaaattgaatatttaagttaaatatttaaataaaaaaattgagaatagtggattcaaatatataaaattaaagagtataaaatatgaaaatataaaaacatgagattagtgagttcaaatatataaaattaggggtgaaaaatataatattttaggacagatactagtaattttattgaaataagggggtgcatttgtccatcctcacttccaaataggtccgccgctaggtgcaggcacgaggcgggtagtgccatccccatccttgaccccaaccccaattaaagaagtcggataatccttgaacccgtacctggtcaacttagatattccctgtcaaagtcgggacgagatcccatgggtacgatttcatggccatgcctattcattatcttagaattattaataacaaagttctaaattgagggaagaatcaaatcaaacgaaattttaaagataaaaaaccaaattaaatctaaatggtaagtttgttaatttttataaaattatctcacatgactaagtcaaacaagaaataatacatattctcttactccattttttacatggcaagacaatttgtacaatactatgctaaggtagagtagtaggataagtgatttatagtggatcatatattttgtttataatcatctctgtcgaaaaatcttattgatcatttttagtaggtttctctccttccaattggaactggagacctcatcatgcctacttaatcccatagttattaaaaccggttcggatcggccggtcgaaccagttggaccgggaaccatagcatcaaccgggccgagttggctaatgaaccggccatgcaagtggcccggtttgacccagagaaaatcggacggttttgggaaaaatcgggaacccgaccgatttttaggacccggaccaggttggtgaagaaaaaaaaaccttcagacgcacaaaaatggcgacgttttgggccccagggaaaaaaaaagcttcagacttacaaaacacaaaaaaaagcttcagacgaaaaggaggaaaccgttgtggaggtgtgtgttgttgacggtggcttcaagatttgaggtgttttgcaatggctgtaatagtgtagtttgttgtggaagtgatttgtgcctttgtgaagacaaaatcaccaaagtgaccaaagaaagtagaagagccgtgtgaggctgcggaggagaaggaggctgcggaagagaaggagccaacaacttttagttatatatatatatacacatacggggattaggttttttatttgggccccaaatccaatttacttcctgcaccccccattattgcatccttcactcctttttggttttttttttatattaaaattggacttatgttttaattgaagtagttgttatttacattctttttttattaatacactttacttgtgttatcaattttgatacttcaattgttattttaatttttttattatatttttcttaattaaataatattagttatatatttatatatataatagaattttaaaaattttaatatagactgggccaaaccggaccaattacttatccaccggttggatcactgacccattacctcgatcgggtcaataaccagaccggttttaataacaatgcttaatcctttatgacatattcctctttttatcttctttatttcattttttatatttattttttattaaccaagtaaaattgggtattataaaaaaacacgacgaaatctatatctatatatctcaataaacaaaatgttgtacatagacaagaaaaaataatggtaaacgcgtatccgtaaaccaaatagcagaatacttgaatttgatttttattaattacactccaacaaagaagatgcaaaacccactaagagaccttagattgaaggtgcaactatgccttaataaagtctttctgttgctaagaatgcaatatagctaagcaaatctgtttggtggtcaagagcagaaatctcagggttaacaatatgtgcagcactcaagtctgcctcacatgatttaggtccatcaccggcaatagcggccaaatagttagcaatttgaggatcgtctttcagcttaatcaaagaattcctaaacgaatcaaccgtactttcatagtaaatttcacatcttgcaatggcgggaacatcttttgtcttcaccaatcccttaagaaacttttcaccctctattcccttcttcaagcccaactccaagattgcctctgcaagttcaagaaatttttttgcacccaggactttaggatctgctcttagaatattcgagcactcaatctttttctctgggttttcattgcaaagttgaccaataaggtcggaagtcggaaccatcaccaagatctcaagcatttgttagcgaaggagactgagcaatgagaaacaagcaaagggtgagcaacagggaacacagtgctaaaaaattcattttctggtagggagctgttttaatcaaaaggcacttagttgcagtgtgtggggactggggagtaaataaagtttacaaggtgttgccttcttttatagtcttgctgctaacattccacaattattgcattactcttttaaaattacacctatatatttatatttttaataatattatattttaaaattttaaattaaaatatcaaaagacatttattacttagaatgcaaatatttattctattatcatgtaagcaattaaaatgacatttatgacacttagatagatgtttgactattcaaaaaagagaaaatatatttgattttttgagcttatctttttacttaaaatataatattcaggaaaatattcttactttattcattaacaagatccttaaataaggaatatttcgttacattttaactatatttataatattcaaggaaatattttaaaaatattttttttggaatgcatattttctaatccttgaaataaggaaatatttttgaatcattaagttatattaatatctttataatattgtactttaaagctacaaataaaatatctcaaggctttcgtatttattattttagaatgcaaatatttaatatgttttcctatagtttaacccctttttttagtttaactttttctacttacaaaatagaaactgaatgaaacaattttcttaataataaataattgtgtatgataaaaagtgctgatttttataataattatttcaaaatttatatttaaaataattttaattaattgataatggactaaaattatttgaattattcaaaaaatatttttggagtattataaaatgttttatttaaaataagtcacaattaatttgtttgtttttctctctctaagattcacatttatttacgtgacagaactgagtgcccgattcctttttgtttatatttttggtagcaattgtaaactatcatcacaactttaccaatttcttacaagatataattatattttgttataattctttgaatgatagattatggtaccctgcaataacactaatatgttatcatcttaattaattacctatactcaaaatctatagtaattaacaaatctataatacctctttaaatttttttaatatacataattaaggttgaaataaaaactaaataaaataatataaaataaggaagcaagtatataactatgtcttcttcagaggatatccttaaccaagagaaaaatcacatcaagattactctgcgaatgttattaatttgcttttattctttactctgtgttaaaaaatcatatagctttcagtagttttaaaacaattcagatatttaataatcataacataattaaattaaaatataaattaagatgttaaaattaaaatcatatatatatatatagtatatgaaaggctaaataaaaatgtgtctaacatgatatatatttaatgatcaataagcttaaaaatatacaattcacatgtataaataaatataagtatatgaaaggctaaataaaaacaaaaaaaatatcatcatttaaagatgcttaacgcgaaaaataaatatgtataaaatgataaatatgtataaaaaatacatttatgcctctataaatgtgcctaacatgattcaccagtgtgccttccaataagctacacatatgctactcttgtaagttattttaagagtttatgaaaaaaagttaaaagtatcttagagcagttgaaagatatatatttttataagtttttttttttaaatactctcacaaaaatttataatatgaatctaaataatttgtttataagctattgtaaatgaaatatagatcaataagtcttgtgaacttttaaaatagttgtgtaattgtgatctatttttatatatcttgatacgttataataaaagttatctcacttgatatgtcattttatatgagttagaattctcttattttctttttctccatttcataagttttttgataaataaataaaaggaagataatacacccattacaaacactaatatatatatatatatatatatatgtatatatttatagatgtagagaaaaataaatagaaaaatcatagtcctttatatataaagagaaagaggatatatccaatgaaaccacttcgtattatgaaaataaaaattacaaatattgacatatatatatatattaatattaataatattacagatatatattaacactattattatcagtattatattagaaatttattaataatttaataaatattaatatattgaatgcaaatataaatacgtcaaaagaagattaatcaaaaatattattattaatactataaattatatatatatgtgtgtgcgcgcatgtacacgcacacaattttgatttttttaaggtatatatgtatttatataactttcatttatatatgaaaaaaatctattaggttagtgtcgtaagtaccttttttttttaaattttgtcttgaagttctaatctttatcttttttattttatcaatttttttaatattttcacacataacatcataatctatttgctttataataaaagaagatcttttttaaacacgtcattctcaaaataattgctatatatatatataatatttatatattaaaatttatcactatattaattacacttgaagaaacacatccaagctaataaattttattttgacatatttcattattagacatgacaactgaatcggacagggaatgttttgtctcttaagttctcgactctccaacatatcttcgtaacttgttctcaatatttgatatgttaaaatttgttttctcatttttgtacctgttgggtgtcaagtatccatgttcctaccccatctatggttcatatttataaaatattttttgtaaaaaatatatcaaaaatcttattttagaaaaaataaattcattgttacatatttattttaactacttatttatcaataaattcattataggacatttgtctaaaaaaaataaattgattggtgggtatgaatatgactatcaggcgggtagtgacattctcattcctaaccccaaccttgattaaaaaagttgaataatcctcaaattcgtacccggtcaacttaggtattcattgtcaaaatcggaatgagaatccaccagaacgggtttcattgccatccttattcattttcttagaattattaacaaaatagttgtaaattaagggaagaatcaaattgaacaaaatttaaaaaataaaaaaattaattaaatctaaatgataaatttgttaacttttataagattacatgagaaagtcaaacaagaagtaaatcatattctcttactctgttttttacatgatcagacaatttgtacaatactaatcctaaggtagagtagtagaaaaagtgatttatggtggatcatatattttgtttataatatggaccgttaaacttcctagttgtatgagatgttataatgcacatccgccgactagcccaaaacgaccaagacgttttcgccactgcctcgtccaaactaggaggtgtttcttacggtatctgaatttccatttacgccaccaaacacgttgagattgaagtaattcaaaagatggaaaagggattatcgttcgaaacttggtattataaataatgaacaagttttttttttttttgaacaagctaacattctggaaacttggttgacaccaaaaattcagatcctctgcagttttgagtctcaaactatatgacactgaggagaggaagaacgttggtgcattgatgcagaggtgcatcatagttttgtggacatgagatcaatctaatgatcattatttgtggtgtaccataaatcaccaaggagaatagatgacaaaacaggaaaaaaagaagagaaacttagtcacggatcctaaccggccagcatcaaattttacatctctaattaatgaagcaatatgttagttaattgaaggaagctggatgaaaaatttcggcgttttccattgccattagtagaatgtatatgactcaagagagcagaaaccggaaggtcacaaactcaaaacaaggggcatggagccaacttttggaaatgtatgcacttctagcaaaattgttcatgcataattttttctcacaagtagaatatataaacaccggcgttgttaagaatatacatagacataggtatctaccgtatcgttgtcaaaagtgggacatcataacccaaagttttaggaattatataccgtgtatggaccgtaacgttaataaaagaattactactataaggtatgctcagctttttcttaaaatgttaatcaataacattttaagaattatacactggtgttgacatatgccataaactaacgtacattttttatgagacctcttttcccctctataaggtatgctcagctttttcttaaaatgttaatcaataacattttaagaattatacactggtgttgacttatgccataaactaacgtacattttttatgagacctcttttcccctctcatcatccccttatatctttgcaattcttttgaacgaattaacctcctcaagtttcattttgaaccaaagtttaaagttttatttggagtcatgaatatcatcatccttgggtgcttggtgttggcaataatgccattgtttggtggcatgcataagatatcagctcgaagtggaggtatgatccatgcatgcatgttctttcatgtatttagttggtttgggaaatatatggtacaattgaagtcctgggcgtgacgtatgattggattaatcaatcactaatttgtttgatgggttggtaaaaagacttgtgggaaacacttctcggattaatcagttcataatatatatatatatatatatatatatatatatatatatatatttggatatagcaacacaaattaactttggcagggactcatcagtagagaattcatgttggtaggaacgtttttgtagaagtcttttattatgaactgtatgtcattattcatagttggttagctttgatggggagtttatatgtatatctgatatctcaagtgagaaggggactatgaagtgcacaaaccaattgcttggtctgattcctttcggtacctctttaatgaatttcccttggctggcattttttttactagtatagcttaattaataagatttatactttcaagtaataattaataaagttactttcttaattacgataatccatccattctttcttcgttcaaagcatagcacgatttctgatccgaacaaaagaagcaacacactgatattcatttttttttattataaagttattattttgtttttctttttagttcttaaaaactattttgtaaatcaactgtaaaaatataaaatctgtttcgtaattttattttcaaaatttttttagaaatgagaaaaaaaaaaaaaaatcagtttgttaaatttggttcaaaacttttcatttagatgtaatgtgatgtctattacctatgggttatactatgttaggttcacttaaagagggggaaaaaggaaaaaataatatgttttaataaaaagaaacaaaatctcaatatttctctattaatttttcccccttttcaattcaaattttgtaattttttctcgttcttcgttcaaacacaaacataagattaaatttgtttcacataaattacagaagcaaccaacttccttgtaatttattactatttattacaaaagcaattcaaatttccaaagtatattgtttttcttgttggttttttaacttttttttcttcttggtaaaatagattgtggcgggaaggacatttcatacaccataactgttggtgggcatggcaacgtaacattcggatcaattcaagctgcaattggttcgataagaaacaacaatgatcggtgggtcaagattcatatacaagctggcttatacacgtaagttgaattgaaatgttattattaagtattggtttgttctttccaaagtattgtttaatgtttagtctagacgtgtgcatggttctgtttttttttttttttaataaaaaaatgaaccaaactgtatttcctaatccatttcataatcaatatcacataacatcagtaagccaatatcattatgtataatgctactacatactacataatctcaagctccatgaaatggtggtacaaattcctttagatgttaaagcttgtatatataaatcatacaacacagatgaatacatgaacaaatgcaattaaagcaagcccacttaactataagttgtatttacttaataaggaagtattcaggatttaaatcatacaagaacagtactcatacaataggcagacaacatatctatcggaaatttacttaacggactaaactaaaaacaattaaacaatttaatgtcttgcggaaagtcaaaaagggggcatcaagttaattcacaatttacttatttgcaatgtttacaaatatgaaatactaattatctggtatgtgatggtttgtgtgatgcatccttgtggaatgcatgtatttatacacaatggtgcagcaacaacatagtctcgggtaggggcaaaggagaagagaaatagttacgtgaacttgtgggtattgtttggaatgcagggcaaataccactgcaggggggctttagttctactaattatacaacatgtacttgcctttggtaccctttaaataaaacaccttttattggctgaccaatttttttttttttagaatttctgatcttggaccaaaacaggaccaattccttttcttttctgctaaaaaggcattgatcaaaatcaatttatcagcagttttcattcactagagtccatttcagcttcttcatggctgaaacttcaggaaaatacaacttcgtttatgtagtaacatcatactaccttcttccatttttcaacagcaatacttggtttatttcataatcatttataacaattaagattactcttaattcatcttagtttgctacaaatgactcctcctactaaaacagattcaagaaatccacatacacacaccagacatataattctgaatgtatgcatgttcaacaaactaattgcctagaaaaagaactttcttaactagtcattggatgattttatggctcctttcatgttctaagcctatcatgtttcttttcaaatttggctgggtatttttctttctttctactaatatgaagacaatcctgccttagctaatctggaacattatgaatatgctgccacactagaaaaaaaaaataaaaattaaaaaaacagaaaggatgattgaagggatatcagaaacttgagtttggatttttttcatgtgtacttttttcttgaatttggatcccattttagaaatatactcgcctttccacatgtatattgttattcccatattctaattgtgcagaggaaagatttatattccccaagaaaagccctgcatcattttagaaggagagggcagccagacaacaatcataactttctgggactacaaagtaatggacactagcgctacattcacttcatggccacctaatgtggttgtgactaacattggtttcatggtacataaacaaatgataaaaaaaaatcattttaataacttttcactattaatttcttcttcttcttctttctaatgtatttctatttaactgcagaacacatataacagcatgaataggagaagcaaccctaaaattaatattagaccagcattggcagcaagaatatatggagacaaatccttcttctttagatgtaatttcattggttatcaagacaccttatttgatgcaacgggacgtcattacttcaaagattgttacatcgaaggagaagtggattttatctttggttatggacaatctttttacgaggtaattacataaatatactttttcaaaagtaatcattttgaacatgaaataatagaatatttttaaatttttttttcacttgtagaattgttcgatcaatgctgtggggacaaataggactggaccaggttttgttacagctcatggacgaaagtcactagatgatccaagtggttttgtatttgaaggaggttccctttatggggatgggaaagttaatttaggaagagcttggggtccttactccagaatcgtatttcatggaacatatttttcctctgtggtaactcctcaaggatggaatgcttggctttatgctggcaaggagtaagtttaaatgaatatattatctcttaaaggataatgcaaaagtaatattcataatttttttgaatcatctttgtcattttgtcttattttttaaacaaattcttgtaggagtaacttcacttatgctgaagttgattgcaaaggaccaggagctgatatttcaaagcgtgttaagtggatgaagaagttaaaccaattacagttcaaggaattttctttagcttctttcgttaataaggatggttggatcgacaatttaccaaccatttcctagaaatcgatgtttcctatcagagattttctgtaaggctaagattagttggttgatctcccatcaatatgctctgtatgctcaactaagatataaataaaagttaatgttcagttattctgttgtactactattcttatgttaaatttatttattttttgaatgatgtctttagttgttagataccttccatagattgaacatttttaattctttacgatgcaacagaaagtaaaagtaggacaattcataataataaaaaaagtggttggagctgtagctaaagatttacccataacacttccgaggaagagtttaggctctgtttgagattgggtgatgctagagtttaagagtatttaatattcctaatgggaacccgacgccttcgagattgcttaccattatctgtggttcatctctgagttggtttgggaattttagtgaagaatgccaattgagttcatacgattcaaaaggtatcaagtgtgtagacaagtagagttaatatttggtatttatttcactcggtttataatgcattttgttatatgagctgatttgctaagtataatatttagggaatactatatgatcatatacaagccaatttggtggtagctgatttggggactgatgcaaagcactgcttctgaaaagcaagtgacttattggccgtggttgagtagggtttgaccactgtatgatagtaattgaggtaaataagatcaatatagctcataaatttcataaaagtattttaaactgtcaacttatagcctatttttttatgctaattgcataacatatatttaattgataataaatttatgtcaattgcatattccaacagggaaaaagggttataatcaatccaccacaaacaaagctatatagcaaaacaacagataaatagacaagtgataaagcattgggtatcaaaagaaccaattaaatagagaaaaagaatgagccaacatgcatggaagttgtgagatggtgtttgctcatggtgttcttcggtagtgcagcgttacaaaaaaattgatcaaaggcaaataagacaaaaaaacgtgactaatcatttttttaatcattggtatggtgtatattattgataaccatcttggaaaactcgactaatcaccattaataggtttaaattcaatgacatattcctctttttaacttcttttatttcattttttatgtttattttttattaaccagataaaattggaaattataaaaaacactactaaacatatatatctcaataaacaaaatgttgtacatagacaagaaaagataatggtggcagctagacgcgtacgcaccccacaaacaaatagcagaaaacttgaatttgatttttattaattactctccaacaaagaacatgctaaaccactaagagaccttagattgaaggtgctgcctaactaagtctctctgtggctagaaatgcaatatagctaagcaaatttgtttggtggtcaagagtagaaattgcacggttaacaacatctgcagcacccaagtcttcctcacatgacaaaggtgcatcaccagcaattttggccaaatagttagcaattataggatcgtctttcaacttaatcaaagaattcctaaacgattcaaccgtaatttcatagtaattttcacatcttacaatggcgggaacatgttccaatcccttaagaaagttttcaccctctattcccttcttcaatcccaactccaagattgcctctgcaagttcaagaaaattatttgcaccgaggactttaggatctgctcttagaatattcgtgcattcaatcttgttctgtgggttttcattgcaaatttgggcaattaggtcggaaccatcaccaagcactctagcattagttagcgaaggagactgagaaacaagcaaagggtgagcaacagggaactcagtgataaagaattcattctgtggtagggagttttaatcgaaaggcacttcgttgctaaggtgttggcttcttttatagccttgctgctaatattccacacttaatgccttatattatatatattattatcattaaattatttagatttttataagatgggatcaaaatgaggatgatttaactctaaaaatgttacacgaaattcaaattgttaatagaaaatgatcttacgctttatattatatatatatatatatattaattattcaaaaaaaaatatagtaatttttaaaaaagttgtggcaaatcaaatacttaataataaaatcttttgatttggcttaaatcattaaaatgtctatctgtttttttaaaaaaatattttacccttttaaaattacaccgatatatttatcttttttataatattatattttaaagatataaataaatatcaaagcatttattacttagaatccaaatatttcttatgttatcatgtaagcaattaaaataacatttagatagatgtttgactattcaaaaaaagaaaatatatttgagtttttgagcttatctttttacttaaaatataatattcaggaaaatattcttactttattcattaacaagatccttaaataaggaatattttgttacattttactatatttataatattcaatttcaaggaaacattcttaaattatttttttgaatgcatattttctaatccttgaactacggaaatattttctaatcaatgaattatattcatatcttcgtaatattatactttaaagctacagataaaattaaatatctcaaggcattcgtatttattattttagaatgcaaatatttaatgtgttttcctatagttttttagtttaactttttttacttacaaaagaaaaactgagtgaaacaattttcttaatagtatttaatcataattcataaataattgtgtatgataaaattgctgatttttgtcataactatttcaaaattatattcaaaatcatttaattgattgataatgtactaaaattatttgaattatttaaaaaatatttttggagtattataatgttttatttaaaataagtcacagtttgctgggttttcttttctgggttttacatttatttcattttgttttatatttttttggtaacaagctatcatcataactttaccaattacttgcaagatataattatattttgttataattctttgaatgataagattatggaatcatgcaataacaccaatgttatcatcttaattacctatactcaaaatctatagtaatcaataaatttataatacctctttaaaaaaatttaatatacataaggtggacataaaaactgaataaaataatataaattaagaaatcaactaaacaagtaaatactatgtctttgctttgtcagaggatatccttaacgaagaaaaaaaccacatcaagattacaatgcgaatgctactacaaataaaaacgttatttccgacggacaaaatctgcgctaaactagaaaatcgtcggaaaaacaaaattttcgacgtaattccgacgaacaaaaatctgtcgctaaaactctcgtaggaaatttaaaacgtcggaattttttttgtctgtcggtaatgacccgtaggaaatttccgaccgaaaaatctgtcggaaatacacggtacataactccaaaatggctttctacgtcgattcgaaaaccgtttgtcgtggaaaatcgacaccttctaagacggttatttggaaaaccgtcttagaataaaataaaatttgaagattctaagacggttttttgcagaaccgtcttagaatgtctttttaaaaaaaaaatcaaattcacggatgtcattcaatgcttacacactaatccagattccaagcatgatttaacaatgtttaggataccaattctttatggaatatacacattaaaaaattgttaatagcaaaaccatcggaaaaaataaacataataataagcacatatgttaataaacataataaaaaccatgaatcctttgctgccacatagcagcatcaactgagaacagtgatggcagcaaatagatcctataaaaatggcaaaatctaaaaaagaacaaaactgatatttttcttcaataatttaaatacttaaaaattaaatacctcttaagtttattgaaagtaggcaaggagtatataaagggataccctgcacacatttaaccaaaaatggtgtaagcataaccatagttttaaatagcgccgctttagcgcacaatctcgcaccaggtgcagtttgcggcacccagccgctacgtccgtgccgcaacgcgacggtttccggtggcggcggtgcggtgggtagcaggtgaggcgcgatagcgccgctacttcgttgacgagaaaacagttgcagagaggcttaggtatagggggcagccagttgggaatttgatgaaatttaagggcaaaagggtaaaagtccaacaataagtgagggcagtttggacttttatcctttatttttttttcttaagaggctgtgtggactgggcatttgtccttcttcctcacaaatcccttcgttctttttcactttccctccctctttccctcctgacgccgctacaacatcttctccctctgtctgctgctttctcgccttctttctctcccgacgaagctgctccctcccgacgccgctgcagcatcttctccctctgtctgcagtgctttctcgccctctttctctcccaacgaagctgctcagctgtcctcttctccgctgcctgctgttcattcgtgcttcacacgggttcgtttctttcttcttcttcttttagccttcacagtgttttaattggttagcttcctcctccttgatattagctttgtttctgcctcctagcgaagaaagcgagggtggacaagaagaagactttcaagaaatgtttgatgatgatcttgattagttattttctttcttgactttgaaagagccattgaaaatttctatttgactctacttggatcatttgtcttcctagaatgttattaatttagttactttcaatgaattagtatgttgcttcctttatgttccttgaatccttgttttgaaagtgtagtattgtatttttcattccttatttcctcctattttgggtgatttcttatcttatagcatttatatatgtggtataatttattatataagtatcttatgtactttacagtagcggctttaccgttacccgctataccgctatagcgtttttggggtcagtcgctacccgctatttaaaactatgagcataacaataatatgaagggataccatgatacattgatatggaacaacataagttacttaattaattaatcatcaagacataagactagctcctcccatatattcataccctctatgatccaatgatcaagtgaaattttcaagtagttgactatcaaaaatattgcataagatcatcaaggctaataatagtgttggtcaaaaggcattttttggcacttgattatgtataaatatttattactcaaggaaccacagaaatgaaaagaaatggatttctcattgacagatcttgaataaattctattatcaagtatgcataaataaagtagtataggaaataagtaaaggtgattattttatattattatattattcattaaataagtaaaggtgattatttttagtggaaaaagaaaatcagtgtgataatcccatccatcccatatccagcggatagggatggcaaacgggccggcccgcaaaaaaacggggcgggccgacccggcccgcgaaaaatgcggggcgggctagcccggcccgcttttgcaaagtgggctacaaataccagcccgccccgctttaatgcgggtcagcgggccagcccgcatcaaaattaaaaaaaaaataaaaaaagtcaatttaaaaaataaaatacaaaaaaattataaaaaaatacaaatatgataattaaaaaaatacaaagttaaataaaagtaaataatttaaaattaatgctaaataaatgatgtcatgtgataattcataaaattataccatttgcaaatggaatttacggttataaactgtccaaaagtgtaatatgctagtaataaaaactatttgaaagtatcattatcataaccattttaatattaaaacttagaagttaattatgagagtgcaaaagagtataaattaaaaaaatatacctatttcaaaatatgttaaatatatttatttaattttaatatttaatatttaaataatacaggcccagcgggctggcccgccccgccccgcgtttggcccgcaattttgcggggcgggccagcccggcccgcttttgatttgcgggttgatattatcaacccagcccgcgtttttttacgggctacgcgggccggcccggtgggccaagcccattttgccatccctaccagcggacaacagccatgcataaataaagtaaatgggcccacaatataaattattggcatggcttagcaataacagatatgttattacaaaaagctatggaactctacatatacaaggaccgtgacttgaaattatatcatcttctttggaagaactacctttaacaaatccttgtatattttcttgaatacttttgtcctgttgtgagtcccaaagaaattgaataacatacatttgcattgaagccaaaggaaaggaaaataagaaattgaatgttatttccatcatatctctaaaccacatcttattacacatgctttgagtaaatctaagagcatatgattaacatacaaattattttttatcatatcataaattttaatatatttattaattttcttttttattcattctttaaatattagataacacattacatgtttatcaaacatattcttataattatcctaatgagctgttatataatggtgagtggaatatatatatatatatatatataagtgtaaactgaaattacgcgtggataactataagatataatatttatatagaagttctagtaaatgggcatggcaatgacaacaatgaattaaggatgggtcaatttttgtcacttaaggtcaccatcttagagggggggcattaaaattgatggatggaggaaaacaagatgccccaattgggcacaacaaaactggttagctcagatggacgccgactctggaaaaaaaaataattaaagcttagatgttgtttccgtgacttaatcagcaacaaattaattaaacagaaaaattaattaacaaaaagactacacagttgttattcattcaaggaacttaaagctttttttttcttttttttttaaaaaaaaaaatacaaaccacacaaaaatatattttaaagaaattatattatatcattgatagttgcccatagaacatagtgtcagaaagagggtattgaccaaaaagctagcgtgtgaaataatatatacaaacacacctgagggtcttgagggggaaatgcttgaagtgacgctcccatgttaactgatagcaaattggcacaatgtccacatctaactgtccctatggttagcaaactgctgtatagaacactaatctaccattttccaataaatactataattatttacaaagagaaaaaaaagttatagaaattagaaaccaataactgaaagctagtttggtaagactattttttaaaactattagcagcaaccacgcaagcaaataactatactaagcttccagtcagttactgttaatctataactatcttttacttttaggctgcttcaaaaggcttccacagcatgaattgaatcagggaacaaagcaatatatctgtaactatgagttagaagaaaacaagggtggtgagaaatgaattttaccttcccatagcatcatatgatttttatgtcattatccaatgtggaataatatcaaatgcatactttccataagaggaggaattctagggcccaattgtttctgcttattttgaagaataattgatttttttaattaatagatgtgtttatgttaaaaaaggcttaaaaacttctgaaaatagtttcaatagaagttgttatcacataatccttttttattaatagacaaaaaagcgcttaatgaggaaactgaaatcatgaagatcacatttagaaggatacaatattttctctattgatattcacaccaaatctattattatttcttcttaaattttttatatctaaaactttagcaacataaatttaataccaatctcctctccaattgcaaatgcaaagcctcatttgggtaattctagatttgtgcattgtgcttcaatattccatccaattcaaacaaaaccttcaccaacaacatctctgccttcccatggttctcaatactaaaataggtaatccaagtacacataatataagaaattattttggtgaactgaaagcaggggtttgaatatttattttcaaagctgaaacctctctgcatactgcatgtctaaaacaaaactgggtaccctaactccgtcttgtgagtacgaatttattaataatttgtgtgatggccttagcaagaaagattgaaagccaacttaccccacagatgatgtatccagttcattctttgaaagagttattgttatcattgatacatgccttgtcgtctccaaactaacagatggacaaggataaaaatagagtgtaaggattaagcaagctagcatccacctgattggatggtatgtttaacatttgaaccatttagatttaagatactattaatcagagactgcacttacggaaggaggccttcctctaggggctcccaagtatcagtgatatcagtggatccaattgctatattctggtggaggcccacaattctcctttgcattaaccccaagaagtaaacattaaaataaatcctcatcaaataaaacaaaaatactaagatagtggtcagccaagctaatcgcagaagcaaacataccttgatcaactccacaattgtcacggttttgttgatagctctagagccaatcaatttatcaatggtacctgcaaggaaaggaaaataatggcagaaaacagagagagaaaagccaaataagggttgaagaagaaaaagggtttgagtataacctcagagcagagtacagtcagtacactaccaactcatgaacgacggaacgagcaagggctaaggagcgacgtcgccgatggaccaaggagtgatgccatagcaacgagtaatgcagaccagcctcaccagcaacgccaagacggagggaggaagaagaacgaagcacgaaagtgaagaaatgtgaagaagacgaagagacccaggagccgagccgtagcgggtaaggggggttgattgggattggggttgggtcatggagtgagaagaagatgaggagggggctgttgtgctttactattaggtttccacaaataaattaattaattaatataagaaaaaatcagttacccatggaatattcatgtttcggaaatatgtcatcggaaataggcctttttgttgtaagactcatatacttattttttattttttgctataactgttaaaaaaatcatatacttatcagtagttttaaaacaattcaaatatttaataatcataacatgattaaaatataaattaagatgttaaattaaaatcgtgtatatagtaaaatcatgatcaatcaacttaaaaatttacaattcacttgtataaataaataatataagtatatgaaaaatcaaataaaaacaaaaaaaaatatcagcatttaaagatcgatgcttaacatgaaaaataaatatgtaaaaaagataatatgtaaaaaaaatacatttatgcctctataaatgtgtctaacatgattcataggtgtgccttccaataagctgctcctatatatgctactctagtaaattattttaaaagtttatgaaaaaaaagttaagaaatatcttagaccaattggaatatatttttataagttttttaaaatactctcaaacacttttaaatatggatctaaatgaaaatataggtaaaaaaaagtcatgtgacgttctaaaatagtcatgtgtaattgtgatttgtgatccatttttatatatcttgatatgttttcataaaagttctttcactagatgtgtctttttattagttaggactcttgttttcttttcctccatttcataagttttttggtaaataaataaataaatgaaagataattcacccattataaagactaacatatattttcttaaaaacttgtatatttatgtatatatatttatagatgtagagaaaatctgttaatccttttatgtatagaaagagagagaggatgtatcaaataattccaaatatattgatatatatatatatatatatatataaatttaagtggtgaagattaaaaaaactgcacatattttttaagtggttttgtgaccacaaattgaattataattttggccatttatatttggttgagtaatatatttatacttttcaaattcttaaaatgagaactattcttatttgatacgctgccatttgtgtgctcttgcaactatgaactataaggagcttaacagaaaataatgatgtgtggttaattagaggcttgttctaaataattaagaatttaagttgaatgataacattggagtcaaaattggttggagttgtagctaaagatttacccataagccttccgacgaagagtttaggctttgagaagtgggaatttacctatgaagtcttctgacgatttaggcactgtttgagattggcaggtctggtgtggttttatttagtatttagtttctcacatttttgaaaaggttatccggttatacaacttcatgaaataataatgttatctcttcgaggctataaaaatatatttatccttaaattgcagatgctacagtttaagagtatttaatattcctcatggggacccgacgccttcgagattgcttaccattatctgtggtttatctctgagttggtttgcgaattttagtgaagaattccaattgtgttcatacgattgaaaaggtatcgagtgtgtagacaattggagttaatatttggtatttatttcactcggtttataatgcattttgttatatgagctgatttgctaagtttaatatttagggaatactatatgatcatatacaagccaatttggtggtaggtgatttggggactgatgcaaagcactgcttgaaaagcaagtgacttattggccgtggttgagtagggtttgaccactgtatgatagtaattgaggtaaataagatcaatataactcataaagttcataaaactattttaaactgtgaacttatagcctattttttatgctaattgcataacatacatttaattggtaatgaatttatatcaattgcatcattccaacaaggaaaaagggttataatcaatccaccacaaacaaagctatatagcaaaacaacagatagatagacaagtgataaagcattgggtatcaaaagaatcaattaaatagagtaaaagaatgagtcaacatgcatggaagtattgagatggtgtttgttcacggtgttcttcggtggtgctgcgttacaaacaattgaacaaaagcaaataagacaaaaacacatgtgactcgtcattttttttaatcatcatagtagtgtagtatggagtaatttattgacaatcatctccatcaaaaaacttgactaatcaccattaataagttcaaattcaaacccgagacctcatcatacctaattggtaattgcataacaaacatttaattggtaatcaatttatatcaattgcatcattccaacccgtaaatagggttataatcaatccaccacaaacaaagctatatagcaaaacaacatatagatagacaagtgataggcattgggtatcaaaagaaccaattaagtagagtaaaagaataggtcaacatgcatggaagttgtgagatgttatctgttggtgttcttcagtgcggcattaccaacaattgatcaaaggcaaataagataaaaacaaatgtgactagttattattttttaaaacgatgataattgatatgaaagtattttattgataattgtatccatcaaaaacatctgactaataacttttaataggtttattttctctcaatcataaaattcgaacccaagactttaaaaacacttatcatgcttacttaaatctttgtgacatattcctctttttatctccttttatttcattttttatatttattttctattaaccagataaaattgggtattataaaaaacacgacgaatcctatataatggtacatagacaagaaaagataatggtaaacacgtacgtaccccaaaatcaaatagaagaaaaacttgaatttgatttttattaatttctctccaacaaagaagatgcaaaaccactaagagaccttagattgaaggtgcaactatgccttaataaagtctatgtgtggctagggatgcaatatagctaagcaaatttgtttggtggtcaagagcagaaattgcagggttaacaatatgtgcagcacccaagtcttcctcacatgacaaaggtccatcaccagcagttttggccaaatagttagcaattcgaggatcgtctttcaactcactcaaagaattcctaaacgaatcaatcgtactttcatagtaaattgcacatcttgcaatggcgggaacatcttttgtcttcaccaatcccttaagaaacttttcaccgtctattcccttcttcaagcccaactccaagattgcctctgcaagttcaagaaatttttttgtacccacgactttaggatctgctcttagaatattcgtgcattcactcttgttctgtgggttttcattgcaaatttgggcaattaggtcggaaccatcaccaagcactctagcattagttagcgaaggagagtgagcaatgaggaagaggaaaaaaaaaaaattaaaatattgtaattttaataaaaaaattatgaatatattgcagtttgaaaagtatttatatatgtagagcaatcagtcacaacctcactaggacgcaatcagtcgcgcccccaccaggcgtgactgaggcttagtcacttcccagccaggcgcgactctgcagatggtgacacgtgtcattttgaggcgtaatgcgtaaaaacttcgaaatgtcataacttttgactggaatgtccgattgaaacgaaaccggtggccacgcgctcgcaattgagaggagaaaccctagacaattcccaaaggggacttggtcaaatttttttctaaaaaatgcctctaagtatctcaaaattacgatttaatcttcgaacctctaaaaaatttcttgttttctaattttttatttattcaattagtgaactgaatgctattttttatttttttgattacatgtattaatttcaaatgttttgacataaagtatgcctacatcggacatttctatcaaaaattatgattgtttgaagtttatatgcatcaccaattttacaatataattttattcaatttttgaaattagtgttgcgaccacaatattgtcattttttaatttattaaactcaaatcatttaaaaatctacaatataattttagtaaataaatataccaaaaaaacattactaaattttgataggaatacccgacggagacgtattttatatcaaaatacttgaaattaagagatgtaattagacaaataaaaaatagcatgcaattcactaattaaataaataaaaaatcagaaaacaagaaattttttggaggtttgaagattaaatcgtaattttgaggtacttagaggcattttttagaaaaaaaatttgaccaagtcctctttgagaagtgcatagggtttctcctctcaattgcgagcgcgtggccaccggtttcgtttcaatcggacattccagtcaaaagttatgacatttcgaagtttttacgcattacgcctcaaaatgacacgtgtcaccatctgcagagtcgcgcctggttgggaagtgactaagcctcagtcacgcctggtgggggcgcgactgattgcgtcctgctgaggttgtgactgattgctatacatgtgtaaatacttttcaaactacaatatatttataattttttattaaaattataatattttaatttttttggcatgaggaagaagcaaagggtgagcaacaagggaacaccgtgctaaagaattcattttgtggtagggagttgttttaatcaaaaggcacttaggttgcattgggtgggggagtaaattaagtttccgaggtgttgccttcttttatagtcttgctgctaacatttccacatttaatgcattatattatatatattataatcattaaattactaagatttttataagattgatgggatcaaaatgacgatgatctaactctaaaaatgttacacgaaatttaaatagttaatagaaaatgatcttacgtttttatatatatatatatatatatattatatctaatgcatttattacttagaatccaattatttattgtgttataattaccatgtaagcaattaaaatgagatttacatagatgtttgactattaaaaaaagagagaatatttttgactttttgagcttatctttttacttaatataatattcaggaaaatattcttactttactcatcaacatgatccttaaataagaaatattttgttacattttactatatttatagtattcaagaaatattcttaaaatactttctttgaatgcataatttctaatccttgaaataaggaaatactttctaatcattaaattatattaatatctttataatattataatttaaagctataaataaaatatctcaaggcattcgtatttattatattttagaatgcaaatatttaatgtgttttcctatagtttaaacctttttttagtttaaacttttttacttacaaaacagaaactgagtgaaacaattttcttaatattatttaatcataattcataaataattgtgtatagtaaaattgctgatttttaccataattattcaaaattatatttaaaatcatttaattaattgataatgtactaaaattatttgaattattcaaaagacacttttggagtattataaaatgttttatttaaaataagtcacattttgtttgttttatcttcttctgggattcacatttatcttcccaacacggttcattgcccgattcattttgttttatattttttggtagcaagctatcatcataattttacgaattacttataagatataattatattttgttataattctttgaatgataagattatggaactctgcaataacattaatgttatcatcttaattacgtatactcaaaatctatagtaattaacaaatctataatatctctttaatctttttaatatacataattacggtagaagtaaaaacagaataaaataatgtaaattaaggaaacaatgaagtaagtgtgagataaactaaataatctaatcatgtttatacacaaacaacataagcaattagatcaaatgcgaaaaaattaatatcataaatatttttcgtcattgctattcttttctttcttcgaagatgagtgacaattgtccatgagttaagtaatctgtgaatactttgtaaatcttctaagctctagctctaatgcacagatgatgtattgcatatatttcagagtgagctcagggaccccaaacatacactatatatagaactaactcaaaccaccagaaagtcagttgttacgtgcacaaaacatgagttgttataaaaaatactgaaatattgaaactgttgtaataatgggataatgggattttcagtttaagttagtgaaccactttatgagttagtcttggttggttatcaagattataggaactaacattctcccacttgtccacatatctcgtcatatgctatagtgagaaataaaatacatgaattatgacgatagttcctctagtatatacgagtactatcttccatgtattacattacattctatttcttaaacccatacaacttaatgaataaacccaatgtttattcttggtccaaacttaattgatgtttctcagaataaaaaattgtagatgcgcataaactgaatgaaaaacatcacaatagagtttcttaatatcattcttacaatgaaaatcacatatggaaaccaagtcccatcctttccaaatgatcattaaatttaaatggtggcatgcccttagttaaaggatcgacaatcattaattcaatgctaatgtattcaataactactgtattatctttggcacgttctcttatgactagatacttaatatcgatgtccttacttcaactacaacttttgttattctgtatatcttcaatggcctaaaaatggaatccataactctaagacaagacatgaaactcctcattcatacaccatgttaggtagcctcaaaataagaaatgaactcggcctccataatggaagtagcagtcaataaggtttgcctgatacttctccaagacacaactccactggataacataaaaatatatcccgaagtcgattttctcgaatcagcacagtcagcatagtctgaatctgaatagccaatcacttccaagttgtcagtccgtctgtacataagcatgtagtctccttaacaatccaaccacaaaagcaatatcaggtattgtgtagaactgaacatacataaggctttcaacatacacaatgggagctacacttggtgaacaatcactcattctaagtttttttcaaaactttgttaatataggtctcttgagacaaaccaagaacacatcttactgtctctatgtatcttgataccaataatgtaagaggcatcacccatatcctttatatcaaagttcttagagagaaattgttcacctcatatagtaaacccttgtcattggttacaagtaaaatatcatctacatataaaataaggaaacaaattttgctcccactgaccttcgtggtatatacagtgattaataacattttctacgaaatcgaatgaagaaataacatcatgaaattttaagtaccactgacgggaggcttgttttatatataaatttcttaagcttgaataccaattgctcatccttagtagaggagaatccttcatgttgtttcatataaacctcttcctctatgtctccattgaaaaaagttgttttcacatccatttgttgcaaccaaggttgtcagaatcgcgattctacgtagactcgtggagacctcgtagaatcgaatcgtagaatcgtaagagtctacttcaaaaaaaattacctataaaaattaacctttgattaagaaaatatattcaatggttaaaaatagtaaaaataaattttacttgtgcaccatagccatccagcccatcccaccaaattgtgcaccatagccatccggcccatcccaccaaatacatatgactgatataagttttctcctttcggcatattggtttttgagacatgtgcaagtaagatcaaatctcagcccttaatctaaatacattcagctgatcataattttatttcttcctctttcacattgtgattcgtgaagcatttttttttctttccctttctcagtcacagactcacagtccttccccaatcctcaaatcacccctcctctcgtcgaaacccgaccccatctccattcaaaatcatggccttgtatgtggactgaaactaccactaccagcgaagcagcaatagcgaaacgaaagaaagcaaagccatgggactgatcatgatcaagcttgaagtggcacggaagcacgaaagaaagacaaagccatcgacaaaacggtgccgttttgaatttattcagactcgcggactcgcaatcaaactcgcgattctaagtggaatcgggcaagtctacgtagaatcatacgattctactccgtttccaagtttgcttccgattcaactcgccggggggtgctggactcgtaaaatagtccgagtctgccagttaactcgcgattttgataaccatggttgcaactctaagtcaaaatgtgcaaccagtgtcagaatgatgcgaagagaatctttcttagataaaagagagaaggtctccttgtagtcgatttccttccttttgattaaatcccttggctatgagtattgctttatatctctcaatgttgcctaatgagtctttcttagttttgaatactcatgtacattcgatggcttttgcaccatcagacaactgaacaagatcccagactccatttgatgccatagaattcatttcatcttttataacattataccacaagtttgattccttagaactcatggcttgtgaaaacgtttcagaatcattttcaactccaatagtataatcagattcctgtagatacaaaatcactcggtatcgctgatttctttattctgatagatctccttaatgttgtttcattatcttcttgcgaaacttgttgttcaattggttgatcaataatttattcttgttcctcgtgaacaacttgatctactagattatcagcagattgtggatcttgaatgataggttgcacaacacccggttgagctggaagggtattgttaagagcaacaaatctaagatttgaagtagattgttgagtaactgaatgatctttctcagaaacaaaatctatggattgatcgttcccactaatcaagtcattctcaagaaattcaatatttcttgattccacaatcattgtactatgaaattgatagtaaaaattgtatcccttagacctttcagcatatctaatgaagtatccactgatggtccttgggccgagcttcttttctggtgggttataaattttcacttccgaccggcatccccaaatgcgtacatgtctcaaacttgattttcaactcttaaattactcaaatggtgtctttgggacaaccttagttgtaactcggttcaatatgtacattttcatctttaatgcttcagtccacaatgagttaggaagcttgaaactactaagcttactttgcaccatgtccattaatgctcggtttcttccttttgtcacaccattctgatctagagaactagacatagtgtactaggcaacaatcccatgttcttgaagaaacttcgcaaatagaccaggtgtttgtccattcttcgtgtatctaccatagtattcaccacctctgtcggatttcacgatcttaatttgctttccacattgtttctccacttcggccttaaaaactttaaaagcatctaaagcttcatctttagaacaaagtaagtagagatatatatcgtcaataatcgtctatgaaggtgataaagtatttcagactacttgggtccatgtatggacacaaaatatttgtatgtatgatttctaatagatttgagctcctctttgtaaccttcttagacttgttagtttgcttacccttaatgcaatctatacaagtatcaaaatcaacaaaatccaaagcactaagtaccccttcatttaccaatctcttaattttatcgatagagatgtgtgtcctaatcttaggtaccacaacatagaggaatcatcattcataacacattgttttgtgtcaacattaacatgcataacatcataagtggtatcattttgcaaattaatgtaaacaaaataaaaacatgttgcaaatcaatccaccatatgttatgattaatcatattagattcacaacaaactaaagaggtagacatatctttcttttccaaacaatagcttgaacttaggacagtttttcttcatgtgtccttccttgttccaactgcaacctctcctcttcccgaacacacatgatcatgagttcattaatataccatttgtctttgtgtgtgttgtcggatattttaaagggaccatatggtgggagagtattcagaaaaaaaatgcaccagaaaggagtcaaacatgtccacctctagagtttttagttgagctgtaatgtccctcatatgcatgatgtactcacgcacacccctcagagtattgagttttatagaagaaaatttcattattaaggtattggtcaatgccttccctgaagtctcaaattgttcatcaatgtatttcaggaacacttttacattgtcatattattcaactgagcccttaatatcagcctatattttagtcttaatgaacatcacacagagtcagttggatctttctcaattttcatacagatccatctcctctggtttactattctttgtaattgctagtgactcaactttcctaatagcataatcaatgtccatatacactaatgtcaatagaatcatttcttttcatatagaaaaataatctcctctcaatttcgggacatcaattgtattaataggttgtatagttacaaaataattcaacatatatgcttatcattaaaatttgaggcaaaataatgtaccatgttttaccaatgtaagtcatgcttataaaattatgaatttagcgacataaaatttgtctatgggctaaaattttaattcaattaaattcacataaatattatgataaaactatcaagttatatttctttatccttataggcaaatcaaaaaaatataatttaatattttatcctaattaatcatacaaaaatataataaaattttttatgggataatatttactatattatattatgattaattataattaatatcatataccttatgtgatctaaagagtcttaatatataatttaaataattaaagttgttgtggctagactttaattaactaattataaagatcactaaatattatataatttccaaaattaattttattgtaattaatcataaacaataaaattaaataatcaatcattcagattaataaacttaatattacattataggaaaacataaattaatacatgtaatgacataataacaatagatcatgtgaacatatattacaaaattgtcattagttcaattggtaaaatgctttaaagttatttatttggttatgggttcaattcctatctaatgcattttattttattttattttaaattcttgaattgtcaagtcatgatagcataaatcatgaaatgacatagtaacaataaattacaatattatacataattccttatatgatctttatacaacttaatatataattttaattaaattataggtattgagactaatccataattaattaaaattataaagatcacctggacataaaacttaatcatatgagaataaatcatattatgcacttcaagattaagatataatataatgataaataaaattctcatatataattacataattaaaacataatattatgcatttgatttaatatatatgaataaaataaacttttttataatatattcatgcataaaataaataaaaactctacaaattctaaaattaaacaggaacgcataagcatataatagatagaaaaaacaaataactattagttaatcttaaatagcttagtagtttgtgcaagttttactaaatggatggatgtggggttgagacccagcaagagcaaaatattttattattataattattgttgttgttgttgttgttgttattgttcatcatcttcaaccttgagctgggtcactttgacccggttgtgacccacgaacctgaaataaaaatctggtaatttttcagccattttacaacaccgaaattcatgttttaatttgtaaaaagcttaaaaactcaatttgcatataatttcagtttaagttaatatatcactttataacttaatcttgattggttaccaagattataggaactaacaacaagtaaataactatttcttccccataagatatccttaacctagagaaaaatccagatgtgagtgttcttagtttgtttttattttttactctgtgttaaaaaatcatatacttataagtatatttaaatcaattcaaatatttaacaatcataacatgattaaaataaaaattaagatgttaaaattaaaatcatatatatagtaaaatcaggatcaataagcttaaaaatttgcaattcacatgtataaataaatataagtatattaaagattaaataaaaagaaaaaataatatcagcatttaaattaagatgcttaacatgaaaaataaatatgtaaaaaatgttaaatatgtgtaaaacaacatttatgcctctataaatgtgtctaacatgattcataggtatatatgcagtgttgtgaaaaccagttcggaccggtcggtccgaccggttgaaccgggaatcggtcccttaaccggtcatgcagttgacccggtcaaaaaccggtcaaactcggtcaaaccagccaaaaccggccaaaaccggtcgatcggaccggtctgagtttttttttttaaatgtgtttttcttaaattttttttggcttttttttttaatttaagattattatccataattattttagattttgaagtatgaatgaatttttttattcaaataatgttagttatatacttatatataacagatacatatataattttaaatttttaatatataccggttcaaaccggtttaattactaaaccaccggttgaaccactaaaccactaacccactacctcgatcggttaaatgaccgaaccggttttcacaattgtatatatgccttccaataaactcggcatatgctactctccacaacaatctgtaagtatttcgaaacaaggattctcgacatgctatgcaaggcggcaagtgctacttcctgttagactaagcttaatacgacatttatgcctttataaatgtgcctaacacatgattcataggtgtatatatatatatatatatatatatatatatatatatatatatatatatatatatatatatgccttccaataaactccgcatatgctactcttgtaagttattttaagagtttatgaaaaaagtgaaaaatatcttagaccaatcggaagatatatatttatataacttttttaaatactatttgtttataagctcttgtaactgaaatatagatcaaaaagtcttgtgaccttttaaaatagtcatcatgtgtgaccccttttttatatcttgatacgttctaataaaagttctcacttgaaatgtccttttatatgagttagaactcttgtttttttttttctctatttcataagttttttaaataaataaagtaagataatgcacccattatgaagactaacatatattttctttaaaacttgtatatgtgtatatatatttatagatgtagagaaaaaggaatagagaaaatcctaatcatagagagatgatgtatcgaatgaaaacatttgaaaataaaaattacaaatattgacacacacacacacatatatatatatatatataattattaataatactacagatatatattaagacttttattatcagtattatcttggaaatttattaataatttaataaaaataaatatattgaatgcaaatataaatacgtcaaaagaaaattaattaaagatattattattaatcctctatatatatatgtgtgtgcaatcttgatttttattgaagatacatatgtatttatataacttacattttatatgaaaaaaatctattagtttagtgtggtaagtatttttttttaattttgatttggaattctaatctttatcttttttattttatcaaattgttttttatattttcacacatcacatcataatctatttactttataatcaaagaagaaatcttttaagtacaagtcattctctaaataattggtaatatataatatttatatattaaaatttatcactatattaattacacttgcatacacacgtcaatgccattaaattttattttgtgacatatttcattattaaacatggcaacagggcgaggcaagggtgggatgagtattgcctcctcaatccttgatcccgactcaccaacatatcattgttcttgctcgacgggttaaaatttgtttcctcactcctatactcatttggtatcgagtatccctgtccctgccccatctccttttcagatttgtaaaataagtttttttattaaaaaattatattaaaaattagattttagaaaaaaaaattaattgttacacatttatttttaactacttatatatcaataaattcattatagggcatttgtccacaaaaaataaattgattaacagtacaaggactggtatgggtacgggcacgtgacgggtagtgacatctcatccttgaccccaatcccgattaaaaaagtcgaataatcctcaaacccatacccgatcaacttagatattcttagtcaaagttgggacgaaaactcacaggtacgtttcattgtcatgcctatttattattttatagatttattaataacataattctaaattgagggaagaatcaaatcgaacaaaatttaaaagataaaaaaccaaattaaatctaaatgataattttattaaattttataagattaccatgaaagagtcagacaagaagtaatacatattctcttaccccattttttacacggcaagacaatttgtacaatactatgctaaggtagagtagtaggacaagtgatttatgatggatcatatattttgtttataatcatctccgtaaaaaatctgatcatttttagtagattttttccatccaatcataaaatttgaacccaaaacctcatcacacctacttaaacctgtctgacatatttctctttttatctccttttatttcattttttatatttattttttattaaccaggtaaaattgggtattataaaaaacacgacgaaacctatatatttctcaataaacaaaatgttggacatagacaagaaaagataatggtaaacacgtacgtaccccaaaagcaaatagcaaaatacttgaattttatttttattaatcactctccagcaaagaagatgcaaaaccactacgagaccatagattgaaggtgcaactatgccttaaaaaagtctccctgtggcaaagaatgcaagatagctaaggaaatctgtttggtggtcaaaatcagaaatcttacgcgtgacaatatgtgcagcactcaagtctgcctgacataatttaggtccatcaccagcaatagcggccaaatagttagcaattcgaggatcgtctttcaacttaatcaaagaattactaaacgattcaaccgtacttttatagtgattttcacaacttacaatggtattctttaattcgttaacatacttttcaccctcttttcccttcgtcaatcccaactccaagattgcctctgcaagttcaaaaaaattttttgcactcaggactttaggttctgctcctagaacattcatgcactcaatctttttctctgggttttcattgcaaagttgaccaataaggtcggaatcatcatcaagcactctagcatttgttagcgaaggagagtgagcaatgaggaagaagcaaagggtgagcaacagggaacacagtgctaaagaattcatcttctggtagggagttgttttaggttgcattgggtggggagtaaattaagtttccaaggtgttgccttcttttatagtattgctgctaacattcccacattcaatgcattatattatatatattataatcattaaattattaagatttttataagattggtgggatcaaaatgacgatgatttaactctaaaaatgttacacgaaattcaaatcgttaatagaaaatgatcttacgttttatattatatataaatatatattaattattcaaaaatatatagtaattttagcaaattttgtgacaaatcaaataattaattttaaaatcatttgatttggcttaaatcattaaaatatctatctctttttttaagaaaaatttagtctttaaaaattacaccgatatatttatcttttttataatattatattttaaagatataaataaaatatctaaagcatttattactcagaatccaaatatttattgttttatcatgtaagcaattaaaaatgagatttagatagatgtttgactactattaaaagaaaagagaatgtatttgactcttgagcttgtctttttacttaaaatataatattcaggaaaatattattactttattcatccttaaataaagaatatttcgttacattttactctatttgtaatattcaaggaaatattcttaaaatactttttttgaatgcataatttctaatccttgaaataaggaaatactttctaatcattaaattatattaacatctttataatattatactttaaagctataaataaaatatctcaaggcattcgtatttattattttagaatgcaaatatttaatgtgttttcctttagtttaaccgttgtttttagtttaacttttttttacttacaaaagagaaactgagtgaagcaattttcttaatattatttaatcataattataaatatataattgtgtatgaaaaaattgctgatttttaccataattatttcaaaaattatatttaaaatcattgaactaattgataatgtactaaaattatttgaattattgaaaaagtatttttggagtattataaaatgttttatttaaaataagtcacaatttgtttgttttttcttcttatgggattcacatttattttcccgacacgattcatggaatcatggcccgattcattttgttttatatattttggtagcaagctatcatcataaatttaccaattacttacaagatataattatattttgttataattctttgaatgataatattatggaaccctgcaatgacactaatgttatcatcttaattacctatactcaaaatctatagtttaacaaatctataatatctctttaattttttttagtatacataattaaggtggaagtaaaaactgaataaaataatataaattaaggaagcaatgaagcaagtaaagaactatgtcttcgccagaggatatccttaaccaagagaaaaaaccacatcaagattactatatatgtgaatgttattagtttgtttttattttgtactctttattataaatcatacacttatcagttgttttagaacaattcaatcataacatgattaaaatataaattaagatgttaaaattaaaatcatatatatagtaaaatcgttatcaataacacttataatatgaatctaaataatttgtttataagttcttgtaaatgaaatttagatcaaaaagttttgtgaacttttaagataatcatgtttaattatgacccattattatatatctttgatatgttataataaaagtcctgtcaattgatatgtccttttacaccagttaggactctcttgttttcttttcctccatttcatatgttttttggtaaataaataaaaggaagataatacactcattataaagtctaacatatctttttacttaaaatataatattcaggaaaatattcttactttattcattaacaaatccttaagtaaggtatattttgttacattttactatatttataatattcaatttcaaggaaacattcttaaattatttttttgaatgcatattttctaatccttgaactaaggaaatattttctaatcattaaattatattcatatcttcgtaatattatactttaaagctacagatgaaattaaatatctcaaggctttcgtatttattattttagaatgcaaatatttaatgtgttttcctatagttttttagtttaactttttttacttacaaaagaaaaacagctgagtgaaacaattttcttaatagtatttaatcataattcataaataattgtgtatgataaaattgctgatttttgtcataactatttcaaaattatatatattcaaaatcatttaattgattgataatgtactaaaattatttgaattatttaaaaaatatttttggagtattataatgttttatttaaaataattcacagtttgttgggttttcttttctgggttttacatttatttacctgacatggctcatggcctgattcattttgttttatatttttttggtaacaagctatcatcataactttaccaattacttacaagatataattatattttgttataattctttgaatgataagattatggaatcatgcaataacactaatgttatcatcttaattacctatactcaaaatttatagtaatcaataaattataatacctctttaaaaaaatttaatatacataaggtggacataaaaactgaataaaataatataaattaagaaatcaactaagcaagtaaattaaataactatgtctttgctttgtcagaggatatccttaacaaagagaaaaaccacatcaagattacaatgcgaatgctattagtctgtttttattttttgctataagtgttaaaaaaaatcatatacttatcagtagttttaaaacaattcaaatatttaataatcataacatgattaaaatataaattaagatgttaaattaaaatcgtatatatagtaaaatcatgatcaatcagcttaaaaatttacaattcacttgtataaataaataatataagtatatgaaaaatcaaatagaaacaaaaaaaaaaacagcatttaaagatcgatgcttaacttgaaaaataaatatgtaaaaacagataacatgtataaaataaatacatttatgcctctataaatgtgtctaacatgattcataggtgtgcttccaataagctgctcctatgctactctagtaaattattttaaaattttatgaaaaaaagttaagaaatatcttagaccaattggaagatatttttataagttttttaaaatactctcacaaacactttttaatatgaatctaaatgaaaatataggttaaaaaaaagtcatgtgaccttctaaaatagtcatgtgtaattgtgatttgtgatccatttttatatatcttgatatgttttcataaaagttctttcactagatatgtctttttattagttaggattctcttgttttcttttccaccatttcataagttttttggtaaataaataaatgaaagataattcacccattataaagactaacatatattttcttaaaaacttgtatatttatgtatatatatttatagatgtagagaaaaaaaatagagaaaatccgttaatccttttatgtatagaaagagagaggatgtatcaaatgagaacacttcatattatgaaaataaaaattccaaatattgatatatatatatatatatatatatatatatatatatatttaagtggtgaagattaaaaaactgcacatgattttttaagtggttttgtgaccacaaattgaattataaatttggccatttatatttggttgagtaatatatatttatgcttttcaaattattaaaatgagagctatttttatttgatacgctgccatttgtgtgttcttgcaactatgaactataaggagcttaacagaaaataatgatgtgtggttaattagaggcttgttctaaataattaagaatttaagttgaatgataacattggagtcaaaattggtgaattattttaattaaatcttatatggaaataggtccattaaaaaaattgggttgttgagtaggaaatgcttttaataatctactgaaaatcatactctagttatagatgggcaccctaacattaggcatatgcaaaatagtctgcgctttcatcaacacgatggtacgatacgacgaacagagcacattcatctaaactataaaaaaaataaaaaatcaatgaggcaattaacattaaacatttaatttactactactataataataataataataataataataataataataataataataataatatactaaatcaacaaaatagaataatatatatatatatatatatataatcacgtttcttcttaacttagcttcttttttaagatgaaaaataataaatcaacaaaatagaataataatagagatttacttaaaaatttctaaataatccaaagaccaactagtaatttaattattgaactagttaaaacgtatggcaaactttaccgcacgtgaaaaatgtagaaaaaattaatgaataaataattggacccgagctcaattaattaatttaaaccaatgccgtgcccctacgtgtaaggaatccaaatataaacatcaattaatttaaatattttcttaattctggtgaattaaataattgaatcatataaataagaataaaattagtacttactatggacccatttataaacaaaaaattatcttatataatagacttaaatataagtaaatttaattaattttattatatttaatattattattctaaaacatgctttatttaattttaattttatttttgatgactctttttatgatgtaaactaatttttttaattaatataaaattaattattttaacttatatacgagttaaaaaattattatttaaaatatttaatttaattgagagtgttaaatttctcttaaattattttttaacttctctggtgataaaaacttacaaacatcaatcagttatatgtatattttttctcacttttacatcattcaagcattgattttaattaagaatattttgtgaaaaacaattaatgcaagtaacatattagattggatcttttaaaaatgatttaatttagactttataataaaaattagctagaggtagtattatttaaacataaattattataaatttatcaattttataatattattttaaatatcatataaatattgatttttgattagttggtccattcgataaattttatatatacgatattgtttttctttttgtaatataatgatgattttacacactcacacacacacacacacatataaccccagacccagacccacaccatacgtatgatactctttttcccattagatttttaatatcacgttaattaaaattacctttaattttttcctcatgaaattagccgaggaaaaggtgaggaaacatatcctttcagctttgggttaaaagaaagtgaaatattgaattaatcacactttaataactcccttctgtttcttctatatatatatatatatatgatgagtgtgtgatcccaactccacaattgtaagcatatataatttaatcatccattgaagtggttagtgtgagtgtgaggatgcagggtattagattagtgttttcaataatgttggtggttgctggcattgtaggtgtgccacgcatatatcggctcaactctgcaatggtaattttttagatattcaacgggaatgcgagaggtactatgaacccgaagggccaattatggatccatctccagcctgctgcaacaccctgaaaaatgttgatatcccctgcatgtgcagaatggctggcaattttcagtcagaattcagcggggaaaaagttgtctatgtcctcaggtattgtggaagaacagttcctgccggactccgctgcggaagtatgtatatatctatctatctctcttttcttaattaattcttcaaaaatactagctagtatctttattgtattagttcaagaattaaacaaatatatttttattgcaatgtataaaatatttttatgattttttatgctcttttatgaactttttaataaatattttttctttcaattttttaatcattgttctaacaacacctttagttcttatgcatgtatgtcacgtaccttctcctagctatttgacttcatgcacgtaacaaatttcaccttaaacatacatacaactttttaggctttattagtatgcacttcttcttgtgatattttgatccttcattaactataccgatgatgtgacaacgcctgaaattgatatgaggctgatgttattaaatgcttaattatatgtttgtaatttgtaacatgacatgtaaaaaaataagaggataattttttttttcaaaatatccaagatgagtttagaattatccccaaccctaagctccaatagtacgtaataccaaactactaaactaatattttttttttaatatatagatgagagtactttaaatgaaatcaagtttgcacatatatttattgttactaaacaaaaatgttatatatactaaatatattagtattatattagacatttattaataaattaataaatataaatatattgaatgcaaatataaatacgtcaatagaagattaatcaaagatattattattaatactagaaattatataattgtatatagttatatatataagtaatatatgtgcgattttgatttttattgaaggtatatgtgtatttatataactttcatttatatatgaaaaaatctattaatttattgtggtaagtattattttttttggaattttgattgagagttataatctttatccttttcattttgtcagttttttttatattttcacacatcacatcatcataccatgttatcaattatcatgtcaaaattgagaaatcaaatcacataattataatatttgagataaaaatgtatttaaatctaaattttaactggctccaacaaaagaaattgactattccatcacaaatttacaatcatatttaatttttaaagtaattattataaatattaataatttaatcatattcgacaatttatgttaatcgaatgatggcataattttttttacttcttataatatatacccagatcataaacaacaatattctcggcttattttcaaagctttgcagtatgcaagctaatttcttgttttttattattattgagacgactaatactattaagccatgtttttcagtttacactgctacttctcgtctggtgtgaacgtcaacattgaagacgtatgcatacaacttcccttacctcgggatccataaataactagataagccaaacatggcctgcatgcgtcattgcgtcctatatattatgtttttctttttcggtttataataaataaatatatttcactggtttatgtatgacaccgagttcaatgttaattcagatagcagtgatatatcatcccatgatgtttaattttctttgaaattattatataaaaaataaattgaatatttaatacaattctatttaattaacattagcatcatttttaatcgaagttaattgggtcagtagtagatgaatctaatgatagataaaaataagataaaaaagaaaaaaaaaagaggagaaaaaagtgtaaataagataaaaaaaaaaataaaataaaatagaagtaaaaagagacaaggaaaatttaagataaaaaaatatacaatactaatgtatttaacctttcaccaaactaattactttttttaatttcattttaagacatatcattcatcaatctatatcacattccattaatttattcagataataattactcagagaatgttaatgtatggagtattttaaaatattgatcttatccaaatatttgtttcaaggagctagatattcttgttatatactaaatgttttctaagttatttattaaaagaactttttttctctcatgtataaatccaacatctgcactacttttcaatttgcacaccgagactaagctcatgcaacccttcaccctaatttctatcagcaccaatagatattaaatatataaaaccgaaaataaattaaataacaaccaaagaggttaattgtttatccaagattcttttttcttatcactttattcaagattcttaaaatttctcctttcgtgtttaattataagatactttttaaaattttatttgtctagatatatttattatttcaagatatatttactattttcatgagatccttttctaatttcaagatatatttattattttttctttacatactttttatttaattattctcttttcaaacattaataaaaataattaagtagataaaaaataagaaaaaaataaatttaaaatgataataaaagtataattgacacgattaactactttttctaatgaatataatctagttgaaatcatcttataattagtaatggaggaaatatattcattgcctttacttttgttaaggttaacttgccgaagtctttgtttcattttttctcccattttctttttcatccacaggaaataattataaaaggtacgattttttactgttaaattgatcatattcgcctcatgtattcttggacacaaacccaattacgtacatctcatatccttacacataaccaataataaacttacaattagttaataaaataaaaacaaataatttcaacctgtaaaataaaaaaacactaatattttcaataaataaataaatgaaacccacaattttctcttgatatttttcttccgtaaccgtcttcttcatcttatttatgtattaatactttattacatttatattcataatattcaccatagcaatggagtattggccggctaatataggctatatatatgttatatggaacagtgaaggctttatgcctaattggaattccctatctaaagattaaatggtagtacgtagattattaatttgtctatgaaatgtaaatgatggccatcgttgcaaatggcgtagcgataaatttatatattgctattagcgtttttgagaaacgaaagttgttttcagggatttatgattcagagacaatggttaatcgcagaatcatcgataattttcaaaacatgcagtacacgtttaacgttttcttattggggtaatacggcgcgtcaaagtatttatgactgaaattttatttctctcatccaaggaggacggttaatctttagtggtagatcttaaattaagattttagattactttttagtggactctatagtactacataggattaaagatctctcaagatctctctaattttttctttaatagtaaatctcattttgagatattagggagagagaaagagagaaaatttattcttttttaaacaatgtgcagatcttgaaaaattttgtacaagaacccattctccatattggagatctctctacttcctttattgggagatcttgtgaagatcagatcttgaactcaagatctttgcttaagatctaccactaaagatgttaaggcgctcatgtaagttaagtgatgatatagacaaattttttgggtttgtgcataaactagaaacttgtgtattaaattatctagtatttttttggaataattgaaaaaatatgtatatcaaagtaaactttgtaacgaaattatatagatttaacttaaaattattattcatacaaattatactcagttcaaagatacacataatttaatcaaataatttcatgcatgtaatagtaattaattgtgataaatattgggactaattttttttatgtgaataatagaggggcatagggattagagtaataaggaggtcatagtttcatggtttcaaatcattctactaatataacatattaattattatcatttatcgattaaaaaattacctgcagtacatacgttgctttaaatccaaagattggaaattaattgtgcgctaagtatcttatttgagtttttgaatttaccgtaattaaagattaaatgtgcattctaattctatgtttattattctctttttagttattgttgctcctgttcctaatttcactactcaaattaataaaatcccaaaattgcatgtacaaattttaatgtttggaaggagtctcttgagattgttctcaattgcatgaaattaattgtatgactctacccattttaactataaaaggtatatctaataaggctttttttatgactctagctagatcaaactaagtcaatattttgtgatgctagaaccaactaaaccattctttattatgactttgaatcaaactaagtcgttcacaaaataaaattaataaaaaaaagcgagactcaaattccaaaattgcatgtacaaattgtaaagtttggaagggatcagttgagattgttttcaattgcatgaaattagacaaatcaacccattctaactatgaaaaactcaaatagaaatttattttcatgatgttaaatcaaatcatgtcatttgtaatgttagatcaaattaggtcattattttttcttatgacactctgaataaaatcaagtcattcaaaaaataaaagaagcaagacacttgaggatattgtgaaaggttgttctcgttcgaaaaaaatataaaagagcaagatgaggaatttatttgtgcacatgtaaaaaggttgacatttttcccaagtacaccaactagcgtgtgaagaaggatcaactctttatttttgtttgttatgaaattaattagtttatatacccaaggacaataatgggtagattcttgtggtaatgtgtatataaggttacttgtgaaatcatgtataaacgataaagtttggaagaaatcagttgaaattgttttcaattacatgaaattagacaaattaacccattctaactatgaaaaattcaaataaaacttaatttttcctgatgttctatcaaatcatgtcattttttttttgtaatcctagatcaaattaagccattttttcttatgacattctgaatcaaaccagatcattcaaaaaataaaaaaaacaaaagacacttgagaatattttgaaagattgttcttgttcaaaaaaaaatataaattcgagttcaaaatatttccatattattttataatttatataaaaaatgccagttgacgtctatttaaagtattatcaatatatataattattggaatatatatatcaacattcatgatcttatatatatataaatcatgaatgttgatatatattccaataattatatatttacaaatatatatcttatagcttactttatttaaatgtgtgtatgcaagaaatattagtttaattttatcaatatagttatgcattcaaaatatatatatatatatatatatatatgtatgtataaaagagtaagatgaggaatttatttgttgcaccagtaaaaaggttaattagtaccaaggattgtactaagtacaccaactagtatgtgaagaaaggtacgttctttattttgttagttatgaaattaattagtttgtatacccaaggaaaataatgggtagatttttgtgttactatataaataaggaggttgcttatggagtcatttgtcaaaagttgaaagagattcattgatgtgagcgatggcagtaaagatttaataaaaactataagaacttttaagttactttttttaaaaaaaattatatatatatatatatataaatattacacatataactatatttattttttgaatgcataactatattgataaaaactaatatttcttgcatacacacatttaaataaagtaagctatataagatatatatttgtagatatataattatttgaatatatatcaacattcatgatcgtatatatatattttgataattctttaaatagacatcaactagcattttctatacaaattataaaataatatagaaattattcaacccgaagctcaattaaagaagtttaaaccatatgccgtgcccgtgcaaggaattcaaattcaaacatgggtgtcttaattaaaatgtgacttcaataaaataaaggttaatatataattttggtatctttataatttgtgatttttattttttattttttttgcttatttaaatatcaagcaataaactttaaaaatactttgttttatttatttaaatatataaatactattttacatgtatcattaatgaagagttattaatttttttgaattataattttttaaattaaaataaaatatttaatatttaaatacatcatgcatttaatttcatatgtctttacttataataaaatttattttaatataaattaataaattataatatataaaaatttgttcttatttaattataattttaaaacaattacacaaactaatgtatggattattcaaaaaaaattattttatgtaatttataaaaattttgtaaatttaaaataatctaaaaattaagattaaaaatgtattacttttataattaaaataaaaacttgtttttatttatatataaaaatgaattctcatgatttttctgtataaaataatttatgtaaataatttacttattaatttatgtaattttattaatttatataattggtagtaaaaaattattaactaaataatttttatagttaaaataaaaatattaatatgtaagtttcctaaaaaattaaatattaaaattttaatcatttatataattagaataaaaataatttacatattaaaataaatttatgtgagttgtataatttacatattaattgatttaattatatcaatttatataattagaataaaaataatttttattaaaacaaatttacaaaataatttgtatattaatttatgaaatttaattataaattggtaaaattaaaattaaaatatttaaattattcaaaataaaaaatataaaatgaattaaaataaaattaaaaatatttatatattaaatattttaattcataaattatcttaattcaaaaaattaatatctcttaactaattatgggaaaatagtgtttataaaattaaactaaataaaacaaatattttaatgatttaataccttatatttaaaataaaaggttataagtttaatttctgtcaaaatcttttttatttttattttatttaattgtttatcacataattatgtcaattatttacataaacatcacctaaacatcaatataacacatcaaaatcaatgtttgatttagatgattaattaacgatcaatttggtggaaagactaaaattacttattttaaagaataaaaaattaaatgtcttgatttaaagataaaaaaactaaaatcaagaattttaaattataccatatcaaaataattggtgatttgtcaataaagacaataagaaacccgatgtaaaatattggcaaaaaaattaaattattgcagtttaaataagaatttacgtaaacactgtgcttccaaaacaaattacaaaactatagcagttcttcacgtggtagcagggcgtgttgaatcacgtccaccatggacgtgattcaaacacgtcgtaccagggcgcaattgaggtcggggacacgtctaagcaaggcgcgactgggtcctaaacacgtcctgcatggacgtgatctagcttctaagggcgtcatccaaagctgtgtgcatggctcgtgaatttgtacgtaaagtgccgaggtgctgcggtccatataaacagaattgcagaggtgaacaggtgtagtagtgagtgatgatgtagctgaaagtgccgagtaccgagataagtgtgtaacccgaaatgaggaagtgccgagatgtcagaactgtgggtttcgtcgagttgcatgggtgccggggtatgcccatggccggtttcacataggagttgaggtatagtcgaactcggacctgccgaggtgattacatgggtgccgggtacagcatacgagatagccggccatgcatgcatggttgccgagatggctttgcatgctacgtgaaattgtccgatgtgcagggatgggtaactgttcttgtaaaggtgccgggttggtgagtataactgaaccggcataggtgccgagctaaagctataaagtttgcaggggtgccgggatgagtgcaggccgggataggtgcaggccgggatagcttgcaagtggcattccggcagtgccgaggtggttgtggacggacttgtagaggtgttgttggagttacaaggtggccgagataacagatggctactggtataaccgggcttcatgggtgccggggtgtgtctcggttttgtatgattaccagtatatataaagatttggtggttgttggcaacgtgtgctcacactgttgagagctctaaagaaacttcttcattctatactttgtggaggcttgcagctgatttttgtctgactaaaattagtcacaaacagcttcaatcaaagtgcacaacttgactttcatttcattctctagctaagagaatggatatgcttcatcagcatgtttggcttggcatcaagtctcgcaaaatccacattgaagtctcacatcaatataaaagctactctatatatagcttcagattttcccgttgctttttggttctgctgaactaaacatgcactccatgcccaaggtgctgggtgaaatgtgactttaacatcaggaacatcttgttatcatcaatgtacaaaaatttaaattacaataaaaataaatcaaattggtaactttgttatatctttgtatttcacgttgaccacattatctataattattatttcaatttctgtcttaatgtaaagactttttcccatatttttaaatctattttcactatatttaaacacaaaaaattaacaaaactttttcatgtacaaaatttgaaataattctaaaaaatgaagttaaattttttttttaatttgtttccatattatatttattttaaattattatattttaatacaaaatattaactcttataacttaatttaaatgaaatgattttttgacccaacttaaagatcttttttcgaaattgttatttgtttttattatatttggacacggaattataatttttgattcatatgcactaacatttttattgtattaaatatatatatatatatatatatatatatataaaagtgttattactgtggttttaatgaaatttaagcttcatacatgcagacgtgtcagcgttcagcatgcagtcatgcagcatgcacctcaaaagtcgaatgctatttgcattgaaggaatggactataaagttataatcttcgccctagcagtgatcaaattgaatgtagcttcccaaatataattaccaatttaccacggtagattcgaaattgtttacaacgattggtatctttaattcgattgtttgggagcaaaatgatgaaattgtatatggtggttcctaccaacttttgtaattttatataccagacaaaagaatgttatggtccgtgtatctgtctaatgtacaaggaagagcacaaaattccactgtacatgcgccaaggttcctgctgctgatactttgagcactgcatgaagggtacaactacaagcaacacaaatccaactacgaaaatttttcatgcaaataaattaacaggcacaacgttacactttcctacttaaaccaaaaaaattctcaaacatcctaatagcctatggaacccaaactcaatcaagattgggtaaagacagcctcacagtgaaaactcatgaattaactggaatgcagaaggaggagctgagaggcggtggcaaaacacaaaccagatgtggcccagcctatgccggttcagttatactcaccaacccggcacctttacaagaacagttacccatccctgcacttcggacaatttcacgtagcatgcaaagccatctcggcaaccatgcatgcatggccggctatctcgtatgctgtacccggcacccatgtaatcacctcggcaggtccgagttcgactatacctcaactcctatgtgaaaccggccatgggcataccccggcacccatgcaactcgacgaaacccacagttctgacatctcggcacttcctcatttcgggttacacacttatctcggtactcggcactttcagctacatcatcactcactactacacctgttcacctctgcaattctgtttatatggaccgcaacacctcggcactttacgtacaaattcacgagccatgcacacagctttggatgacgcccttagaagctagatcacgtccatgcaggacgtgtttaggacccagtcgcgccttgcctagacgtgtccccgacctcaattgcgccctggtgcgacgtgtttgaattacgtccatggtggacgtgattcaacacgccctgctaccacgtgaaggactgctatagttttgtaatttgttttggaagcacagtgtttacgtaaattcttatttaaactgcaataatttaatttttttgccgtaaaatattgttttcattagagctataaaactcatatccataatttatagtaataaagtgacataacttttcatagaaactttgtagttgaatacaaacttttttttcacctcataaagtagtagataaatgagaattacttctaattccaacatgatgaaaaaaagtaaaatgttttacgaaatatttttatttgactactatgcattgctataatttgtattctctagtaactttattacaatttattctaatatatatatatatatatatataatataagtatatgttattttatcacgttacctttttttcttcataaaattggccgtcgaaaaggtgagaaagaaagggagtaaaaagaatcccaaattgaaacgtatcgggtcaggtatggttaaaaagaaagtcaactatttaattaatcacattttaataaccataaggaaatgaacttggagtttggttaacgccacaagttattttattttattaaaaaatggcttccttttgtttcttgtataaatacgtgatgtcaattgtagggttgttagcataataagttgattttggattagaaagaagttgaaattaagtgtgaggatgggaattagagggagcttagtgtttgcagtgttggtgcttggtggcatctcagctgaaacagaaactgaacgcatgttattaggatcaccgacaccatttgaatgcggtgataatatggcaattggattcaattgtgtcaggtttgtgtcacacattgggccaagccctagaaggtgctgacattccctgcctatgccaatattttactatgctcttttcttcagcattgaaaaaggtgtctatgtgctcaataactgtagaatcccagttccacccggaaccccctgccgaagtaagttttctatcatccatactccttagtccttactctgctttcttaattagtaatatagaaaattctattaacttagaaaaggtgcatgcatgcgttaaaagaattaattaatatattcaacaagtcttttgaacaatattcttcaacggaatgcacccagcagcagtggcggaactaggaattttattgagagggggcgaacataaaaaaaattatatcataaataaaaatgcttcgaaaacaatacaaaactaatattaaaaaaaactattacagaaattaaaatcactttacttgattcttaccctacgtgttttcatattattaaaatatctataattgaatccgtgctaaaactcaataagagggtaaatgatggactttccagttcttgctagcccttgacataattcaaatgtagttgataaattaatcaaatatgaatgtttagtaatattaagctcaaaatgttgtaactccatcttcaaataaatctctagaataaaatttatcaacaagtttgcaaatatcatcagtgttaaatgacttgtacttgtttcttggatctaaagacatgctcaaagcaagtaattcaacagtattatcattgaacatgctatttattttttgtaattgataatcaattgtagcacaaaagatatttatcctataaaatttttcagtagaaaaatcaccttgttcatttcgagcacgacctctccttccaacatattgatagagtattttattttattttagaaacaaggggctcaaataacagcttattttattttagaagaataacaacaggaagaagaaagagaaaaagagaaaaaaagaaagaaagaaggagatacctgaaactcttttctttcactaatttaccaaatgaaacaacttttttgactccttctgttctattgggatttgtatttcttttttctcctttgtctttacatctctccattttatagtgttctttctccctctttctctttattattttcctttttattattattttttttcgttttatcatcttcctttcctttttttctttttctgttatcttttttttttcgttttattttattacattttctttcctttcttatatatatatatatatatatatatattttcctcttttatgttttttttcctttttatgattttaatatttttctttttttactacgttttctttatatatttttctttccctttttatttttttaatattttttctttttttctttttttttctttcatttttcttttttttattaatttttttggggaggcgggggcccaccctagcccccctagttccgcctctgcccagcaggacgacctattaggttagtgatagagcacgcctgcccctgataactgtgtcattggatagatagtttaatgtgctcaccgacactatcatgagatgtgaatcatccatgacacattagtacttctcctgattgaactttcaatgatttggtgtatggaagcttatttcctgaatttttgttttttttgtttttggtattgagaggactcatactatgaagccgtgcttttcaggatacacttttcctcctgctcctgctcctcctcgtccggagtgaacgacaacatggaagacgttcccttgggatccctaactcacttaataagtccaacatgcatggcctgcatgccgcatgcgtcattgcgtttcactatttttctttttaatggtttttaattatatttcactggtttatgttagatcctgagttcaacgttaattgagacaacagtgatttataacaacagtgatttatatttcactggtttgtaatgatactcgtgttgctcatattcggtacactggtgcctttcttctaataataattttcgcttataaaaaaacattttagggtaaatagtcattttcgtccctgaatgtgtaaggcgctgacaaatttatccctgaaagatggaaattcaaatttttgtccctgaaagtgaaaaaagtgtgacaaatatatccctccgttaactttcatccgttaccgttaatatcagggacgaatttgtcagcgcactacacattcaaggacgaatttgtcagctatttacctaaaatataatttaatcttcatattatctcttttttaattattgcaagcataacattacaataaacacttaaaaattaggaaaacaagcataaattaaaacaaacataataataagtataatttgtttgttgttctgaaatttctattataacaacattagataatgacaaaatcaaactgagtcttattttttttaagaattaatttaatgactgtgcattttaatttgtttgagtctcatattttgggtaagtattatctcatatttttgctttgaaatttctaatgtgacagtactttataaaaaatatgagatccaaacaaaaatacacaatcattaaattaattcttacaaaaaaatgagacctaatttgattttgtcattacctaatattattataatagaaatttcgaaataacaaacaaattatgcttattaattaatattatgcttattattatgtttgtttttacttataatgtttacccaaaatatgaggctcgaacaaattaaaatgcacagtcattaaattaatcattacaaaaaatgagactcaacttgattttattattatctaaaattattataatagaaattttagaacaacaatcaaattatgtttattaatcaatattatacttattattatgcttgttttaacttatgtttgttttcctaatttttaagtgtttattgtaatgttatgcttgtaataattaaaaaagagataatatgaagattaaattatattttggatagagagctgacaaattcatccctaaatgtgtagtgcactgacaaattcgtccctgatattaacggtaacggacgaaagttaacggagggatatatttgtcacacttttttcactttcagggacaaaaatttgaatttccatttttcagggacagatttgtcagcgccttacacattcagggataaaaatggctatttacccaacattttatttaataattcggacaattacttagacaatgttacttttaaaggaggattttaaaatattaatctaatcgaaatacttgtttttaaggaactcttcgtgttgcagagtatttaaaaagaaaacatttttcatctatatatcaaacaaaagttaattaaatcaattccatgttcggataaatctaaactcaaagtgaattttttaaagaaaaaaaactcaatataaaggcataaaatatcctaaaaatttaaagaacacaatatttcttaatcttgttttgttcaaaaagtacatgagactttataagggagataaaaagagctaggcgaaaaaaaaattgaacagtctgcttggaaaattaatttaatgtattcaaaattaatgtcttgccacttaactaattcatcttagcggaggagaaaacattcctaatttaaatatttgaaagataaacaaatagtataatacaataatataagattacttttgtacgtattctcattactttttattctatgtttggtaagaataaaagtagaaagtttttttgtttttgtttttgttgaatgaataaaaatagaaagagtggaaaaaagaaaaaagaaagaaagaaaaagatgcatgcttcttttgtttgattgttccgtacgagtagaagaaattaaccattagttttgatagcccgtgttaaaaggtctttatgctcaatttaggagaaatgtaggaggtagaacacgaatttggaataaaaatttgtttcaaaataaattttattttaattttttaatgtaatattaattattattatttttatttatatcctttataatattaataatggacaataaaaattataaatgaagtaataataatataaggttaattttataaattattattctcttttaattatttattattttttattgatctacttaaaatataagactataattattttggaatggaagagagtaatgtattcctttcttattatcaaagtcaaatatttagttaacgctcttgctaaaaatctgttacacgtataaatataaatatgtcaatcacatattattagtgtctaatgaaatttaccaataaaaatatcttttttatttttatcaagatcaaattaacataatttttttaaaaaaacaaaattaatatcatattttatcgtaacctcaaatatattgtatcctttattatattatacattagaaaatgtacacaatttttaatgtacttattactttttgtcttctaaaaaaacttcctcgcatggttatccgacagttgacacattctataactgtaaagtgtaaactctgaaacttgggaccaccagaaaattactgaaattgttacattttgattttaaaataaacacttaaaaagacaatatctatattttatccgatcaacaggctctgtgtcgtgtctgtctgctgtgagtgctgagagacaatggaggtgtgcactcaaaccttcacaaatttccttcttttcaacccttcttcctcttcaaactctcttcttcttcgtgctaatgccaacactaaaacacccttcaaattcaattcccttaaactctcatctttttcgcctcatattcacctcttccaacccttcctctctcctcacacttcttctcccttcacactctcagctgctgcttcttcttcttcttcagtttcagttggcacagaacaggaccgtcttccagcagaattgaaggtcactgaaacagcggaacccaattccagagtatgttctttttttttttttttcctttatctttatttctcagtttggttcaactcaacaatcatatgtgaatcatatgtagtttgctatataatttataaagggtgatgataattgtgaaatatatgccaggtgtatttttctcttcaacatgaccatatcttgttacttaaacaataggagaagattcaaattccatgcaagcattattaatcaattgcaaaagaaagccttaaaaataagataatggtaagcaagtgagcacatattctggaccagaattcatatcactgaatatgtacttttgcatctctttccctttgcaggttagattgcatgtggacgtgccatcattggtatgtgaggattgttacaagagggtcatagcagagtttatgaagcaagcaaaggtgctatggggttacacttatgctttatataattatataatgtaatgtctttcttatattctggctcaaagaaaatatatgcatcaaattattgttgtctgtgaatacggtgcactttattttgtctgtcaagactcaagaggattcccagtttctaaatttgaaactataactaaaacctctcattgaaaatttcggattactaaacctcacaatcttaagggatgtgctctatcctatcatatatgaatttacttgagattgtcatggatcccaggtttcagcatccaaaggactgcatgttatctttatgagctaatttacgattgttttaagtcaacagatccctggatttcgccctggaaagaaagttccagaaagcattcttattagttatgttgggagtcaaaatgttcagaaggctactattgaatctatattgaggaggacactctcacatgctatggcatcggtatgttacaatatagtttctattttcttattttttatgtccttatttttttctcttgatgttagttctttttacacttttggattcattgtgtttacttgcaattatatctgttaataattctctgatcttgaaattttacttcattattgaaagacaagcttattggttcatgacctttcctcattacctaagtctatttaacagtgctatctaatagtgcatttatttaaaatctgtgccactgaaatgcctttgatctgaggacttgatactgatcaacagattaaaaaaaatcgttataatttcctgatcatttctccaaggttattactgaataaagtggattattagatcaagtattattctgatcttacacttgagcatttcttaattaactttgtttataggttactggaagggctttgcaggactcagtacgaatagtgactaagttttctgagatggaggagacatattcttctcttgggtctcttaggtaatctataggttaagctttttgaaatatattttccattagagttgttatttttctcttcctttgctgcatctgtaatactaaaactatattctgacataatatagagaaaaggaagactatcattaagaatgctaatattgtcagaatgtcagccaaagccaacgacttctacatgcagattatattaactattctcacttatttaacttctccaatctccagatatgatgtccttgttgatattgcaccagaaatcaaatggattcccgataataatgaatacaaaaatttaaagattgttgttgagatagatagtgatatagatgctcacagagcatctgaacaagaatttagaagacgttataagtccattggtgcactgaaagtggttactgacagagggctacaggtgactaaatttaatttataccagtctgctggcatacaaccatttgcttttttatttttatttttttaatgattatttactagaaatgctattcatttgaaactctcatgaatcattttagtcataaaacttccaagttctttaaagcaagcacaaactatatagatttcatcatgtatgttttatatttagttgtgactgatacaatgaaggatatttactgattattttttatgttatctttactatctcatactaataaataactgtcatacagacacttttattatcttgataattaatatctgtattaataattttgactagtctacccaaaattagccagctgctacaatttttttgctgttcacaggttggagatgttgttgtcctcgacatctcagcaacaaccattgatcaagatgaatcaaatgttaaaagtattccttctgctgaaagtaaaggttgggtgatgtgcttgaaggatgataataaactgataagcgatacaagtctttttctttttgtagtacatcatgaacatatttcctctaaatctatattggatatgcaggctttaattttgatacagaatatggtgaaaaagtattaccaggtttccttgattctataattggaattcaacaaggtgaatcaaagtcttttcctcttgtatttcctgaaacatggaagcaagaaaatcttcgaggtgttcatgctcagtttactgtaagtttctaatgctgaatcaaagaagtttaattgttttagggacatgatctgacatgatagtttttttcttttggtcctttggataccaaattcttcataataaatactttttggccatatgtctcatgcaatttatggtgctttttcatctccttatgatagagttattgtcttcgatttataaaagagggggtaacactttattttcttacattagtatgtttatggtcctagctttgttgctccatcagattttaataccagcttttatctttgcatttacctccaagaaagaggatgaaagcaagaaatgaagctttacctttcttgttcagcttgtgtagtcgtgccccatcatacagtaaccgtgacctagctagaagtcttctagtgttttccatacatgatcctaaaatcaaaaatcaaatccctacagataaatataaaatgattgtgcaatgattcgagtagctgctgtattttattatgaaaaattctatttcttgtgatgatgcttttgcttggtaatataaaaataataataaagttataaatctttgtttgaatatctacttttctaataatctagatgatcttgagagtttcatccagtttgctagtcaagctagtaatccctttcagttcataaaccagattgtgcatatctcagcgactataggttggttgaggaaaggaagtgaagttttcacctatcctgtatatttttagaagtctgtaggcagaatagctgcccctaggcaaaagactccaaaatcagtgattcattagatagagaagttgtgaaaagtttttggcgtgaaactactcctctctagccaagcaccctttacctcaaacttgagaacaggcatctcagaaggaaagtttttgaactttcaggcaatgttgtctaaattgccttcttgctttccattggaggggataatttatccctctgccaaaattaaactatattttctctcaataggaataggattcaaactctggattttctaaatagtgtacacagtgctcaactcattttcatgaatacaacattaggtgcatgtttggatctcatcatttccttttagcttgcttaaacacacctttggctgcatatataactgatcttgattattgtaaataccttttattataacaggttgaatgcaaagaacttttttacagagatttaccagagctggatgattctattgctgataagcttctccctggatgcaccacagtggagcaggtgacttttttacccttaagtacgattgtcaagtaaattaaggaattattttttagttgactttagagtaaaattctctagcatgaatttccaggtcaaagacttgttgttacagaaatgtcaagaggtggagcaaacagctagagaacaagcaactgataatgctatcttagatcagatttctaaggtaacattacattaagtagatgtattggattgattttgtctcgtcttctagattagaacataccttgccacatgttttcaatatgcatgcttatacattgtgcataattatgtgcatctgacatggatacactagagttgttattatgattttctggtaggcatataatgattatcaaggacttcaattttctgtaataagatgacaagacctacctttccttatgaacctcatggttgattttgaatcataacgtatcttgtaaatcatctatgtcatatcaagtatggtggtaagtatatccttcgaaaaaatctgattctgacatttatgaaacaagttacctttaaatttggattccctctctttggccctttcctacaaataattcttttaatgaattttatgctgcaagaaaacattggagtatgtaaattttatcacaaaatatctgtgcatcttgtcattttcagatggtagaaattgatatacctcaatccttgtttgaggaacaaggaaggcagctttacggagccaacctattagaaatacaggtattggttgcaagttgcatcattttcaggccaatcaggcgacttagattccaaatttttacatttattcgtgatttaatgcaaaaaaagaaaaattaataataactcctctctcaggcaaaaatgaaactaaatgagcagcagctggcgactctgtcaagttcgaaggctgtgaacgaatttcttgagcatcagaaggaaaatataacaaatttgataaaacagagtctggcagttggtgatatatataggcgtgaaaatctgcaggtagcatgtttgattaagatacgtttccattctaaatatttgctcaggtcacgctgacaacaaaatctttcccacttataaaaagattacaagggtattagggccaccacaattctgtgattgagaaataatattttgctttgcacatatcacttgctttataaattataattaaactgcctaattggtgagtgttttttcttattggaatgatttgtgcatgtatgttttgtagtttgctactgaggaccttgtcaaagaggttgagaattccattgctgaattcaaacgtcaaaatcaagaatatgatgaggaacgggtgaagggacaggtttgtgccatacttctgagtttgttgactgttgtttattgttttggctgcttcattgtttcctatatgcatatacaacagtcaacaaactctctttcctaatttgtggtttgggccaaactctctttcctaattttgcggattaattgatctgatctttttttactttcgtgaaggttcaagaaatactagaaggagctaaagtgcttgaatggttgagagaacatgcaaaggttcagtatataactaagtgagggatgagcactagccaaaacaaatcaggaaaatgaaattgcatgttcatttgaatgtgtgttgtttcagcggatgtaaattgtgagaaaatttcttgattgaattttgaagaaagaatattaagaatagaataatgcattacaagtttgtatattgagactttgatgataaattaatagtagataacactaataaaaagcagtattgaaaaacaccaatatatttctcaatacaaatctgctttaaagtgtcaatgttaagccctaaaggaaaagaaggaatgtcacttgcaaggatcgctacactctacttaacatagttcagcagctaaaaagaggtctaaaaagattgtttactaatctccaccacttgttccaacagggtcttcttctacaaataaaacaccaactgaagcattctctattaattgtatagtgaacttatcataaatgcctttcttgcaatatcttcccgagttttgtgtagagagatagctgctcctctgaaccaaggttcctcattatctacataaataaaacacttgagcgttacacctatgggtaatgaccataatgaaatgtatccagtttgatttatgtgtgtaatattggaactgaaagaaaacagaatcctctaattttcacatgaatgaaagttagccaataaattgcttaaactagagactcacctgatccaataacatctcaactgaatagtcttggcctacaacaaatgattgatggtaaatgtagacgaaaacagccattaccatctgcagaggatgcatcacagtataaaacacaacagtcacagactcacaatagctgcagagttatttgtgtactttatggcatagaaagccgctcatgatttatggtgaaattgaaagcgctgagcattgaaacaaggtgtatatagcgatggcgtattggcgtataaattttattagtaatgaatcaatttcactttaacatgtcaagacaatgggatatcttagctcatcgataacaaaacggtagatataaaacagagaaaatacccccaaatacttaaagcaagatcaatcatagcagttactgattattgactaactataatgccataaaaaatttgaaaagtgtattctgaattaagtaatagcctattcagatataaaccaaggataattctagtacataaatatctatctatgagcaaacctggcagtccattctgtctgtaaatccaccatgtccaggtatactatcaccaaagtcctgtaatcattcaaagagatcaatgctattgctatgtttgggagtttcaaagtgaatggaaaaaggtgatggatgcaaaataaatgtctagtataaagagcaagaacatactttgattttaaaagctcttttgaagccactagcaaaaaaacctccaaatggtgctatgattgacgcaaatagtcccatccacaaggcatgccactgtactggcaaaactgctatctctttccatggaagctacaaaatgttgcaaaatgaaaaactttagtcttaaattcttaatcttaagcttagtggcaaaaatgctatctctttgtaattattaggatagatttaattttttggtacttacccaatgagaaatcagtcctggcaatggaatgtaatctggcttaaaaattgggtcagggtcacactgaagccaaccagttgataaatcctgaatttatttcaccatcattaggaacagcataaatatttcctcatagatgactgcacccaatcaagattgttaccttccttggacatgttagccactggaagcgacccaagaagtttgcaaactgcacaaacataagtgacatcatcatgcaaagcaaaaatactgaaaaatatcattaaatcaactgaaagtggaggttgtgagttaaacacaaggtgtaaattttgaaagctttttgggaattgggatggtagttgatgtcagtcatgtcactaactgatgtttaccgtaaatgcagcaatcatagtggcaacagacgctccaatgaaaccttcccatgttttctttggagaaagcttgatcagaggtgttctcccaaaatagaaaccgaaaaaatatgcaccaacatcattcatagcaatgaggattgcagggaaaagaaaccttgcatgattatattaatatgttaggttgtaactagaaaaaataaaatcaattaaagcatgaaaaacatagtggttggcaataccaaagcagttactcgtattagaacccagaatttccattgagtgaggatacacgcagatggtagttttgcaggaaagtgaacctctttgggagcaaaaacaatagacatattgtaaatttcatgaatcatgatgccatgtttataaagagtcccgttatttgtgttcttttcttcctcttctttaataatgagaaatctttgtacaagtcaatcaaaccacaaatttaatagaaacatttttaatatttttgagcaacaacatagttaattcaaagaccactaaaattccacttattatatctgattatccttttactcatgtccataacaatatcaaagtcaacatataaaaaattgaacatatttttttcaatacattaaatgtatgcaaaaatataatttttccacaaccatacagtaagttggaatgaaaacaagaattagagaaaggcagaaagctaacagaaaaaaaaaaaagatgcaaattattaaaaagaatttgttaagagactatttcttgacttcttgtttattgatttaatgtatccttttctgtaagtaactatgttctacaattttctgatcaaatgtaaatgaagctagattgcgtagaatcatatttggaaagatgtttaagtaagctaaaatcacatataataggaaaaaataaaccaaaagaaggaattagatgatggagttttcatcatcaagtaatataacagaagtcatgtgttaccagaatatccctgcaaatatgttggctacagtgaacgcagactgggtaaacacaacaataagtatcatatgtgtccatgcatactggccaaactgatacttgtaatatctcttcttcaatgaaagaataaaccatacaaaacctgaaatcacagatgaaatgacttattcaagaatgaaagattatttttttgaaattacaggcagcaaacacttgaacctgcagaagactaggttaacaggatattagataaaattaagttacgtaacaggattgattcagatttatgacgaatatgcccaacaaagacaggacctaaaggtatctttattataattattcatgttttctctcttaccaaatttggtgacaattatgaataaaacatttggaagtactaacctgcaatatataaaaagtagcatataaccatctgatacttgatcaggttgctcacaaatctatacaagaatttatctgaagtcactgtattcacaagttgttgactgagaatacggccatatacgaatagcattgctgtgaagaaataatgcctggacattgcattcagaatcatatctttgtgaaacactatatattaaactaaacatttctcatatgcatataatcatttagaaattaccgtacatgaatgcttaccagttcaagagcttaaacttagggagacgtttatcttgagttgctcttctgagtagattgaagagctcactggccataaatatttggataaccacaaccatggcccagatgtaaagatgacccaagtatatgattagtgagacactcgctagcatccacagagatgagtatgcacggatccacattgatttgtatttggattcatcattgacaagcaaattgtttccatttgatttgcttatctctgcaggaatctgacacaaaaaccatcagtttcaaattctttaaaatgattttttcttcttctatttccccggcccattttctacagtatttgattaatgataaataatgtatacataagttaatgggaagttcatattcaataatgacttcatcaactacatgtaatgtatcttataagaaaaaaaaaatagcatttgaaatgccaaccaaatggatcaataataataagctttggaaacatataaagctagattaaattaggataccacaacaataaagtcttatcccactaagtgaggtcggttacatggattacatgatgtaattcgacacggttaaaaatcaaaattttataaatattattaagtttaagatcttttttgatgatttcctccaactttcttttcaatctccctcttctttttctcggactaaatatcatgaaaaattcgttcttctaactaacacctcttgtgaccttctttgtacatgccaaaccaccttaactgattttctatcatttttccccattggatactaaatcaatcttctctcgtataacatcattctgtattctatcttttcttatgtgaccacacatccatcttaatattctcatttttgctactttcatttttctctcatgtccctttaatacccaacattcactatcatatagtatagctggacatctaactatatgacaaaacttgcctttgattttggtaggtactttgcgatcacaaacaacctctaaaacttttctccatttaagccatcttgctaatgtaatatcctcattaatttcaccaccattttgtacgatagatcccaaatatttaaaattagaaacatatggtatgacatcctctcccaattttacttctgagccaaaatcctcgtgtctcttgctaaaattgtagtgcatatgctttgtcttcctcctactaagtgaaaatcctttgtttccaaagtctacctcaagcttattgttaactgttttccttgattcttcaatcaagattatatcatccacaaaaagcatgcaattagggataattttttgtatgtccttgataagcacatccaaaactatgttaaacaagaacttaaagctgagccgtgatataatcctaccccaataggaaagttcttggtttcatctcttggagttctcacactcgtaattatctcttcatacatgtcttgtatagctcggatataatatagataagaaatcatgtgtagaggagtgaataataattttgtgcatattgtcataatcaaatggtttctgaattgacagaatctatagataactggtcttgcagcagcataaattcactaaaaaacttgatatttgaaataaatgtatccccgatcacaaacaagcatacatgttattatactacaccaacctcatttgagcgtcttctttgtcgaacatttggcgttcttggtgaactacagttaatatcaacctcatttgagcgtcttctttgtcgaacatttggcgttcttggtgaactacagttagtatccgtatgtatatctctcattgttgaagtgatagttcaaatatttttggagtgatatacatgcacggactgagacctcccctgagacattagaaggcaaaagttataaaagcaaacgacacatccctaataggattcatattaatgtatcaaaatggctgtatcctcaaaattcagcactcatactaaatatacataatcactttcataattgggaaagttaaatacacaacaatatagtataataagcaatgaaattagtggacactaggtacaaaatgatattgatgatgtatgtatgcatgcatgcgtccgtcaacaaaaaatttaacaatgtgacctattagtttgagcctcgatggttgattcaaggttttttgaaacaataagcatgtgcccaacatatagttattaaagttacataaaaatagatcattgattgtcacacactcgcaaaatcgaaacccttttttcttgtaaggcacaagtttcatgtgctcaaaacagaaatgggataatgattctaacatcgaaataatggaaactatatatacaagaaaaaagaaataacaatggagaatggagaagcagattgaaatttaagagtacatacttggatttaagaggtaaaaaatgacaaaaggatcaatacgaattgagaaatttttttatgatgttagatgtggctttgctatgtttcagggaaacgagaattaacagcacaagacatagtaggagagagaacaaactacgagagatacgtaatggtccacattgaccagtaataatcgtgggttactttattatactaagtgacgggtccagaccccataaggttactgaaaacactaataaatataaaaactttatgatataaatctattattaatatcataaaatgtactataaaagataaaagtaacacgacatgtttaacagatgaacaataattaattaccttcatggaatttaaaacaaaaaaaactagtcaattctatagttgtccggtacaataataccctccttctcgatgccaatgagcaatgtcgttaaaataagtcttaggacattgagtttgaataagtggatcaataattaatctgatatgatttaatatatattaaaaaataatataactaatataatttaatttaatgaatttacatttcaaattttaataaaaatatactataatatatattattattgtataaatatatattattattactattatttttaatctatactatatacagcggaaaatgtttttgaaaaggaaatttacacatgatatcttcgtaatttctacaaattatattattttaaaaaataatgtttctaataactatgagaacctacgtgtaactttaattgatttgattgaaataactttttaacataattcatgttattattatataaatcaattgagataaggcaaaaattaaataatatgaattttaatattaaatcacactacactaacaaaaaatacaatctataatatatattttcataatatataatttaatcatcattaacgttaatatattttaaaataataataaataaatctaaacttaaaaaatatataaaaatactattgttagaaataagtaatataattttcattcatatctaaaaattctcattttcacacgtaatttataataattgtaaattaccttttatcctttttatatgtaatttcaatgtttgaaattagccatgggaggataaatcacaattttttttaaaagggaatgaaatgtctaaattaaaaaataagagaactaaaatcataaattttttaaaagtggatgatggaaattatattttagcctaaatatttttatatgattacaatttataataaatatttataattgtggtttaaaataaactatttttaaaatgtggataatggctatgattatgaacatttagatatccaaaaaaaaacggcatgatattaaagttattattcacgcgatcgagtatgaatataaatataagaatttttctaaaagacaagtttagggtgtatattatagtatcatactcgaagcctatttattgattgccatccctaattataggaaataaaatttaacattataatatattatacaaatgaaatattaatcataatttaatatttttgtgttttatttaaaataaaataagtgatagtgttaatcatactacaattaattacataaatattactatactttatgatacatgattaatatgtagcacaaacttcttattatttttagttcataattcctaattcaaattttcacaaatttttaactgttaaaaatttaatatattttatagtattttcctcaatatatttcatacataacattcatatatttaatttagattttaatttaaaaatatataattaaaaatttaatttcataaaatcgtcgtctatcaaatatataattaacttatatctattatgaacaacaaaaattaataattaaaatattatactttaatcgttaataattcttcatacaaaataaaaaattataaaaatatttataaaatattttataataatataattttactttttatagataaaaattatttatctataaaaatcaatatcatattaagaataatataaactataatttatattatattttattaaaaaaaattgatgttagtttagttgttggtaaacatttaaaacaccccacgatattggggtcaagtctcctcaacttccttttaagaaaattcatccgtagattaataaagctataacctcaattagatagtaatttaatggtaatctactaataatataaaataattttatattatcatacaatttacatattttttaaggtaattttataaaagttaaagaatttattatttaaatttaacttgattttttatctttaaaattttgttgaatttggttcttcccacaatttacgattatgttcttaataattcttagataatgaaatatgatacaaaataatatttattggcttggtcatgtttttgtacgtgcaattaattaatatagtaatgatttttaatatatcaaaactttttttaggcaaagattaacttttcaattaatattagaactgggtacaagaagtaaccaaacagtttagagggacaatacaacgccatcaacatccaaaaggagtcaaggcatgagtaacccaattccatatagagaattctcgtctgaaatctgaatggttacctagatttcaccaaaaaattaactgtgatcttttttcagtataattggttatgcgactatgacactttttttttttttttctctctttctttagtgtgtttgtttacacgtctatgacattattttttaaaatttgtagacaaattaccaattgcatgtaaattgaattttttcttttggctaatttatcaatttttctgtgtttgtaacgtgtgtctaaagacacgattttcctaattattacagttttgtttttttttaaatggttggaaataacttattctttctaaaatgcagagatactacaattaattgtcagcaacgtaaaattaaggattaattgttattttggtcctctaatttatttttaaaatttaatttgatcatcttagtattaaattttttaattaggttctctaatttttttaaatatttcaattaggtcgttttgtttttagaagttaagtctcttattttttttaaaaatggattcaatttgatcctatttaaaatcaaatttgatcttattttaaaaaaaaaaaatattggagtaggcaaaagaaaattaggataaaattgaatttattttaaataataaaggacctaaatatttttttttaaaaaaagatctaattgaattatttctaaaaattagaggatcaaaacctaaaattaaaaaataagtaataaaataaaaaagccctaactaatcaaaagttctattaaactataattagaacgaacattaattccattcagttggcgtaacaacaattgtggcaaaccaaagaattgggtccacgatgacgatatatttaatcatcaaggaagtaggtataattcgacaagaaagaaagtaggtatgatacgagagagaacaagaacagggcttacaaagatttgtgcctataataaaatacaatcacatgagagatgatgccattataattaacccacactgtttaattttagctaagatggccactttggtcgatgattagcaaataattgaaaatacaaatgcatgtgagttgtgactgcgttagaaattgtgctttgggctggtcaaatgcaactatgcaaattctcaagttccagatcttattatattaattccctgcgtaggtcacatgttgcatggccccaacccacatgtgtcttccattgttggcatcttgattattgattttcggacaggacataacgtgtgttggaaaaaatctaaacccaccatgtattgagcaacaagcatgaaactgtgctatctaaagaatagtagtagataagtacaaaaaacacagagttgttaggtggagggagggggacgaacttagagtgtcatggtcccctcaggcttttaattctctttggaaatactttgttcttactagtatatacttcacttccacaaaagaattatataaaatttacatttagtctcttctcttagttataaaatacatttattcatattttattctagataaagcacaactttaccaattactaaagcataaaataattcatacttaaataaagtaaatataaaattagaaaaattaatattcataatcaaatcttacgagtttacaaaaaggaaggaagctgttcataccaaacaaatttggatttcataattacttttaactaatttgctggtatttttattgagtaatataatgtcttttccgttaatagaatagtaaagatcagtagttgtttcacaacaaagttatatattactgggttaattttggttttgctttgagtgatgatattttataattgtttgaaattaatgaagttaagccatggagtttgacttcagtaaagagaatgagtttaaccattaatttaattagctatttataaattataaccatgggtaacactactagaaaaatgcaatttgctttattataaattataaccatgggtaacagctggataataatttatttattttgctttattatatttagatgaccattgttggtaacattcgtgctaataagtgataacccaggtagtgtaagtcgtctatttgggaaatggaagacgacttttcccacttaagttttattttttgcttttctaattgtacagcgccattagaatttagaactattaggtcataaacaccctaaaataaataaagtaaaatacatggtctaaatagaaacttttggcggcaggtaaataaaataccacacccttaattcataacatatcagaataaaatgataatgattcttaaccagaaaattatcgtagacctcagaaaatttaaaccaggtactgtatagagaaaaaaagagaatttgtgaaaaagagaaaaataaataatgatagatttgtataaaacatgtaaggaaatatgtttgtaacaccatctaaaatattgtaattacgatagagttgtctaacttggaacaaattaaaataatacctcacaagatttcatgtaattatataaatattttttatatttttaactattacattcatatttctaagagaaagtgttggtttaagatttaaggaaatgttagggagtatcagaataatattatccaacatatataagatgatagtagtataatatttttaaatataaagagagtaatgtaggaaaataaaaaagggtaagattatatgtaatttaataaaagctcaatgagtattgttgtaatttactctttaacttattttgtaagatttggtttctctaaagttagagactgtacgttagttgagctaaatcttattttttaggaggagacgcttgataaagaagaagtttttagtttttagaaccttgcgtaacatttttagaagaaaaaaatgttgtccgtgaataaattttgctaagttttccataaagttgtttccacgggaaattagaaatctaacttactctagttataaaaaaattaatgtgataaaaatattaattattcttattaaattatttaatgtgataaataattaaaatttataataaaaatattatatttttcttaaaaaaaactcataaatatctataatcaactaaaaagaattatttatatatatacgcatatgtaccaaacacctccttagtgggttttagaagattacatgagattgaagaatttcaacaatttcacttgtacaatttttaaaaatttaaaattaattatacatttgtctcacaattcttaagacctgttaagaatgagttgtttataaaaatacgaatgcttgtgtaagaattgcaatatcaactattctaatgttgaagctacataataattaattcttaaatttaaaaatccttaaatatcattatctagaataaagaaaaacaaaaaggataaaatatttttcttagactctccttttttttttaagtttcagtttgatcttatttaaaaagttttactttagcttgttaaagtgtatttattagattaaattggtcttttagtttatttaaaggaatcgacaattaccacatcaaccatgattaataatattaatgtggtaaattgtcagaaatattaatttaatataacaaaaatactttataaaaaaactaaaataaaactttttaaaaaactaaaaacataaatgaggaatgaaaggattactttatcaaataaatcctaaactatggagcgatccccgtgagaccttaaagagtgacacaacttttgtgtcttttaagttcatattcaagttaattagttaactgattcgacagacattggtgagagtgggaggttggatgataaaagagctcataatttattactcgtacttttttctaactaaaactgtactctctcatctacttattcacacagttggtcaaattaaaaagcttacggcttacctcagttatgtacttgatgatcatgtaaccaatttttaatttcatgattgccacatcgaaaaaggatagtattattattgatatacaagcaataatttgtttttctactctgtaaatgaaatgagatttgaaagccactctgtctctgccctttcattttgtcttaaattaaaaggaagaaaataagagaaaatatacaagtggaaaaaatgatggacgaagtgtgacgtctctaccattatgcatgcataaatgaatcattgcctgatttttatttttagcttttcatttagttaattttttataacgttaatttagttagtttgatcacatacatatatgaaatagcgttagatctacggagtatttattgataaaattattttttattaaggaatttaactgatcatttttaatgattttttttaattatgttatttcattcatagattcaaacataagatcttactaataaaattaaattcaatatcattttaaccaatgatttattaatatcattaaataagcttattatcaaaccagttaattatacaccgattcatgttttaaaccattcaattaattggtaaattcgaattttacaccaggggtagtagttttggggtcatatcatatgcacttcatgcaatgatagatacataatatattactgaataaaataaaaggcctgaaacgtaggccatcccaaatgcagcaattatatttatatgtagggatatagaggctatcccgcgcatgatcaattgatgataaaattataattattctcataatggatggcttacgtagaataatgagaatgcaagttatggtccaaggaaagtgatgaaatgaaaatgttgtcacgctgcagaagggttatatattatacactaaacagaaatataggtagcttcacattgatgctgtcattactcatttggacagagacgtgttggattcgtgatgacaaccctatccctgaccgcgacctttgcctttgcccatctatggagttttcctatcctctgctttttttcaggttaaataattatttacaattttttttagaaaaagggtaacattcccccatttgttgctagcaattgcccctgcccttaaattttataacgatattggcctttattgcactccatggacgtattctagcctgcaattccacgttcttatgctttgactacccattctcacacatccaacatatggtttcaaaatccctaaaaaataagcatatggtttcaaaacaaaataataaatcattattgcaggtagagtatcatagaagattgagtctagtgagggagataatctttcataaaatattaatcaatctttattttttttttataaaaatgtttatgattaatatttgatcatatctcgaacataattaactatttacacttttacgatttctaatttaattgtttgcaaatttttttatcaattccattatgttttctatggttttctaactatttgctggcttttgatagtaatttttacaagcatttcatattatttttgcattttattttctttcttttttaattagacccacggaaattgaatagtagctcaatgcttagttgccttgtaatgtgataaaatggcaatttgaggtgcatgctcattaattgcttttccgtaaacaacttaccctgtacttagaagtgaatgatggattcttttggtaatgtgtttaggtggatggaaataaacgatttctctcttgtttaagcccgtgtttgtttttctgttgggaatatcccaaacagaccttttcctaactttagaaaatagaaatactttcttctcacaaaacagaatatgagaggccgcactttttgactttagccgatatatgcaaatacacacttagattttggcagttataagaaggtggtatgttattaatatgaaaaaaatattaaaagatagtagtaataaatttagaaaggttatttacttgatgcattggttaaaaaattaaaaactaaatttttactaaatttaaaatacacaaaaatgtattgtttatgattttttatatttttcaatggtttttacaaataaatattctcttcttttaattttttaaacaatgtcataaaaatactgattaataagaccctaataaattatagtaagataattattataaataacaataatagtaattaaaatacattgatagtgtaaatttttaaacattgtcttttaattgttgaatgcgaatcatactcacttgtggctttggatcttattaatcatgatcaacctccttggcattcgtatgctggtttgatatactctattcaatctttcaagaatagaatttgggtcctaagttttaaccatgtctatcgagaagaggagcaatgcgtatataaatcgattagttcatatgggatcatcatcatcagatatattcactgttttagattcttctcctcacccattgacagctttcttgttatgcgagtttctttttctaggctttagttatgtttgtatgaaggatttattaatttttataataactatccttaaaaacatatatatttttttaattggtagactgtataaaaatctttataccgacaacacataaaagttaaattctaataattatctataaattttccatgaatacacaactttttgaattgagagtaaatttaaatcttaaataaaattcattagacagaccaagagtcaaagtcaaagtttttatggtaacatttgaaaaaaatgaagagtgagggagactttagacacagtgtcatgatcgtaaataagggggaagagttggggcaagaaacgaattgacttggaactagacaagggaaaagatagatcatagatagtcattgtgggtccattttgttttcctacactaacactgtactctgtcttttgtatcatctaagttcgttctaataaatctcatcatctaatcttattcttattatatgcacactctacacaacacaacctcactctctctttctctctctttcacgaactcactcgctcacgctctgtttcagatctgaagccacataaccctaaccttcaaacggtacgcattcttctctccagcgacttcttcttcttcttcttcttcttcttcttcgtctgatctccgcatcccccaagatctgcttcttcctcgttgctctgtgaatgcaagtgagctccgtctcaacttcttgttctacactgcgtttctttctttctttcgtctattcttttcaagcttcgttcttttctttagcttgacggtgaacatttccctctcttttttctcgatcatcgcattttcttgctacttgttgctgatcattgggttattatagcttccgtttcgtcgactcatttcattctgttgtgatcgttagcttaattagcttacctctgcattggattatgatcatgtcatatgtaatgaacaaaatccgacttctttacagatgcaattaaaaaactttttactttttaacaataattaattaattattatttttattaatattaagaattttttttttttttggcttatctcttcaaagatccttatttgaattcgttagtttagttgttgggatgggtaattttgggttaccggaattcaacatttacccacgatggattacggctttgcatttaattatgctttaattgcatttgcattgtcttatagcagatgtcttctactttcttgatcttcatggaagagaagaaatgtttctctatgcgtttggtggaagcagaaagaattttcatgtcatttttatattttgaggtgcaggctaggtgtcgctgggacttcaatggcagtgaccgaagctcaaaatcctcttcttggagaaaacacatgtggttccttgttaaaaaagcttcaggtaactaacttcattcaactgttcatctgtgtcacttaagatgcgaatgctctacagaataatgggattaagtaattacattttctttattcgctgtaggaaatatgggatgaggttggtgagagcgacgagcaacgagacaagatgcttcttcagttagagcaggagtgcttggatgtgtacaagagaaaggttgagcaggctgccaagtcaagggcgcagctacttcaagctctgtctgatgctaagcttgagctttccactcttctatcagcacttggagaaaagagcattgctggaattgttagtaactacttgactatgtcttatattgttagtaaagtggcaaactaatttcctatgcatattttttattctttcacagccagagaatacttctggaactatcaaagaacagcttgcagctatagcaccggtacttgaacagttatggcaacaaaaggaagaaagaattaaggagttctcggatgtacagtcacagatacaacaaatatgtggagagatagccggaaacttgaaccttaatgatgtttcacctgcagtcgatgagtctgacctgtccctgaagaagttagaagaatatcaatctgagctccaagaacttcaaaaggaaaaggtaattctgttataatattcaataatgtgtcagttcagtttgtcactaatttggaaaattccatttgatttcattcactaaacagctcattgagagttttgttgcattgccttgtttggcagagcgagaggttgcacaaggttcttgaatttgtgagtactgtgcatgatctatgtgctgtccttggtatggacttcttcagtactgtaactgaggttcatccaagtctaaatgactctactggtgttcaatcgaagagcataagtaatgacaccctagcaaggctggctaagactgtcttaacgctgaaagaagataaaaaacagaggctgcacaaggtaatgcatttagaacatttcttccccttaatttttatttatgcaatagctgttaactgtataagctctcaaattttaggatttttgatatactgtggtttttgtcttgctaatcatgtgtatgttttcaagaaatcaccatcaattctgactttgataccccagagcgatattacctacaaaatgttttgcattcattacttgcttgacttttaatctaataccattttctttactttgacctggatatttcatgcagctccaagaattagcttctcagttgattgatctttggaatctaatggatactcatcccgaggaaaggagactatttgatcatgttacctgtaatatgtcagctgctgttgatgaagtcactgttcctggtgcccttgctctggatctgattgagcaggtactaaagaacttctgaagtttacagattcgagctccaagtatgttattaacttttttttttttttttgtttaataataaaggctgaagtggaagttgagagacttgatcagctgaaagccagcaggatgaaggaaattgctttcaagaagcaagcagagctcgaagagatatttgcccgtgctcatatagaagtagatccagatgctgcccgggagaagattatggcaatgattgattcaggaaacattgaaccaactgaattactggctgacatggacaatcagatagcaaaagcaaaagaagaggctttaagccgaaaagatatattggacaaggttgagaaatggatgtcagcatgtgaagaagagagttggcttgaagactataaccgggtacttaaaatctcgcttctgctttatttctctttctgagtttgaatgattggttgtgcacagccgtggatagagaggtgaagtagtagtattatgatcagaacatttactatcatgttaacaaaaattgtaaatcctttagccagagttaatctgtatccgtctttattatatagtctgctagttttcagtttaagtgatttgttatttgacacgataattgaaatgtttctttccctgtttccggaaatatttagatttttagcattagctttgctgcaagttatgatctttaaatggttgcctaatcctcctcatttggattataatgttacactctgacacaaccttgtaaaacaggatgagaacaggtataatgcaagcagaggtgcacacataaacctcaaacgtgcagagaaagctcggatattggtcaacaaaattccaggtatttgttgaatgagattacaatcaccatcagatactgttattattaattcaatctgctgtcagtgtaagcaaaacaagatgatgccacattattggaataattttgtttctgttggtgaaaatgcagctttggttgatacattggttgctaaaactcgtgcatgggaagaagatcatggcatgtcatttacatatgatggcgttcctcttcttgccatgttagatgaatatgccatgctcagacatgaacgggaagaggaaaaacggaggatgagggtaattttcactaataagatgattaggattactcattttcagcttgatttgagcaattgctaatagtaataagaccacaactctgcgaggaaattaaaactatcagcttggcctatttctgttctgttcactactattctatatttgttatacatactgtggtacggagaggtcataacatatggactttgcactttgtaggatcagaaaaagcatcacgagcagcgaaacacagaacaagaaaccatctttggttcaagacccagccctgctaggccagttagttccagtaagtcaggaggttctcgtgctaatggaggagccaatggtactcctaaccgacggctatcgcttaatgctcatcaaaatggaaacaagtccacatcaaaagatggaaaaagggaaaacagactatctgctcccgtgaattatgtggccatgtcaaaagaagatgctgcttcccatgtttctggtactgaacccatcccggcatcaccctaataacgagatcttcattttcaacccatttatttcatctttgtagcattgtcaaattactagtgctttaggaattataatatgggagtgacaagtaattagagaggaactgttctgagctgtgtatgttcaatttgccatttggaggttttctcaatagatatgccctataatatgaaaatatacagtcttcagtgctagtcttgcctttttccaaaccctagcttctattcattggtttgtttcactttcagtgtttgaaatggtgttacatactcttaaaaaaatgatgttacatatgcacgtctaccctgcaatttcacgtcaaagaatggaaaaaatgcagaagcaacaaatagttgctcacggtgtccggctttatgctgtcaaatgcaaatttccgaacacacattttctccttgtgagatgtttcagttttcagcatcatgtccatggcaattgggttttcataaatatttaagtcacagggcatagtggcggatctccaacatagtgagggtgtatataccctcttctcactttaatattatatataattatttaatatttttatattttgcttccctaattttatatatttgaatttactactcttatgtttttatatttttatatattgtattatttaattttatatatttgaacccactattcttaattgttcttactgatccagggtcttagatctgccactgacggtgcaagcaataaaatggtcctaatcgcgtagcatttttcaagcatggggtattattaatcaaatgttacttattattcaagttgtataaaattaattacctacaaaaatgaaaagggtataaagggttttttcttttagaaattccatgtatttttcatgtgacatgtgattcatgagtattaaatggagaaatactaatgattcaaactcaagatcggttgttaatatgagacaattttgcactagttaaaccatgtccttagtggcgagatttggttatttagagttttgagtgatgtgcaaagttcaattgacgatacaaaataatcttcataacaataattatttttgtttacctgcttaatgcattgaaaatggtagagttgatactaagatacttatatctgcattcttatccgtcaaaatttgttcgtattgcttgtatctaaatcctaaatatcattctcgttaagtgggtaattacttatcaatcaagagtaatttttgtactacccattgggaatcatcaacatattagtggtatttgaacttattttacttatactttaaaacctctaaaacatttaataacagtttagtttgtatgaatggtatgtttatttttcttaggattttttattatctttgtaccggttaaacttagttttggtccttgtacattcaaattgattagcccttcaactttagaaaatatataaattaatactaaatgttaaatttaaacaagaagagggattaaattttcattttttaaagttgaaggaataaattcatcaatttaaaagtatagagactaaaataaagtttaactaaatacggtgattaaaatatatgtttctcatttttattattattgaaaaagtaaaaaaccttttcagacatgtcaatgataaaataattttttatattgttaatgcataaattatttaaatatttcctcttaatactaactcctaaataatccaattaaacctttaatagtaaaatgttcttgtcctctttagccccctaaatttatttattgagttccattgatttgtatttgaagaagagaaaattttaatttttcatctatttttctcatattctagtagctaagcatatcgtaaatgaagatctaattacttgaagaataatgctaactacattctctctctctctctctctctcacattttttataggattctctctataatttgttagaatgtattagaaattaccatttttaataggttttatttatcatttaattattttttcttctaatttatattgaatgagtaacaaaacctattaaaattaatgatttttaataaattctaagcaatcagaatcattgatggagaatatcaaagaaaacgtgtagcattccctcttaactgaattcatgaaattaaattgtatgcttctaaaagtcatccttttcatcaatgatcttgcaaatgactaaattgataatttaaaataaaaaatagcacgaacatatgaattgattatttttaaatataacataatatattatttataatttcttattcagttttaaattatcacagcaattattttttcttagctgagaagtttttttttttttttcccttaattgttgctttggcagggaaagacggtcgaaggcataagtttggaataaagccaacaatcgacgtcgtgtggtttccaataccttctgcgttttgaatttttgcgagaattgagatggcgaacgagaacgaacccgcgaagctgctgttaccataccttcaacgcgctgatgaattgcaaaagcacgaaccactcgtcgcttattactgtaattctctcttttattttaattttagatcgatacctatttttcattatggcaatttttgttgtttcactgatctgaaatactctaatcgtcgttataaattatcacgatgaaatattttttttggtaaaattaggtcgattatatgctatggaacgggggctgaagattccgcaaagtgagcgcacgaagaccactaatgctcttctggtttccctcatgaagcagcttgaaaaggttctaaagtaaaccttgttgtttttttatgctgactgtaatcacaattaactgaaactcaaaggtgatccgcaaataaataaatataaaagtgatttttaattaatctcgtggatccctttgtgttgttttttaaaataagaagggaatctactcatgttaaatggaagtgtctgaatctgaataataatgaattaatgatactatggcatgtttcagtggcaatctgcagttttctttcctttgaaagatgttagtggttgacatgtttgattgggtatgattatggaatttttatttactcaattgatgtatctgaaatatgttgtttttacaggataaaaagtcaattcagttggggcctgaagacaatttatatctcgagggatttgcttcgaatgtgtttggaaaagcagacaagcaagatcgtgccggaagagcagatttgtataataaaatcactctttttattttaatgctagcttgaaataaataaataagcctttaagcttgtatgttggttctgttgcatcagctgtgatccctatggtctcagactctcagtaaagtttacaagggttttttgtatcttcttgtttctttgtcttgaagatagtagctcactctctttacataccaagcatctgtcttttgccaaacatttgctatagtattattaaaaaaaccctttgcataactatcttgcttgtaagaatttttcatctgtgataagtttttaacgtatattctttgacactttgcaggaatacagcgaaaacattttatgctgccagcatcttttttgagattcttaatcaatttggagcagttcagcctgatgtgtgtatttcatgcatagaattgaaccttccttttttatgcatgtctcattgcatttgcatgttttccacaaagcctttcttatttggaaacaatttgcagcaagaatacaacttcctgtaactgtatgtttaatgcttttttgagtttcttttacagctggagcagaaacagaaatatgcagtgtggaaagcagctgaaataagaaaagctttgaaagaaggaaggaagcccactgctggcccccctgatggtgatgaggacctctcagttcctttgagttcttcaagtgatagatatgtatgattcaaaacttcacctggtgtcttctgggtttgatcagttagaaaaacatataaataaattcattaataaatataaacaattaacattgagctgtttattcttgcaggaccttgggactaccgaaactactgtttccagtcctggaccagaatctgattcatcacgtagttatcatagccctgtcaactaccagaatctgccaagcattcatcctgctcctaaatttcatgatactgttaacgaccaacattctgcaaatattccaccatctatgccttttcatgacagagtagataataacaagcattcttccattgtttctccatcatctcactcttacacacctggagtttatccttcccaagactaccatcccaccccaccttcccaagattatcattctcctccaccttcccaagactatcattctcctccaccttcccaagactatcatcctcctccaccttcccaagattatcatcctcctccaccttcccaagattatcatcctcctccaccttcccaagattaccatcctccacctgccagatcagaaagttcttatcctgagccctacaaccatcagcaatactcaccagagaattcacagcatttagatcctaattacccttctcatgaaacttcctctttttcttatccccattttcagtcttatccaagttttacagaaagcagccttccctctgtcccatcaaattatacttattatcaagggtcagatgcttcatattcttcccagtcggctccgctaactacaaaccattcatcaagtgctcaacacagttccagcagcagaaatggaactgttgtggaacctaagtcaactactcagacataccagtatgacagtaactaccagccagcacctgaaaaaatagcagaagcacacaaggctgcaagatttgctgttggggcactggcatttgatgatgtctcaattgcagtagactacttgaagaaatcccttgagttgttgacaaatccatcagctggccagtaagatgttatgtaaatcgaaatgtggatttcaatggtttttctacctattatttgcatgtcttgttttgtatattacatacatcatgcattttaagtgtgaagaaatttggggaagatgaatggaaatcataaaatctgctgggactgcaatctttcttgtttatctggtagttattgagattggcttgtttgtcaaggaattgtaatacatataagagatgtctgcttgatgaatttcagttctgtctgggacaattctctttttctttttttgttttggtcttgcactcaaattcaggttagcgttcattcacccattgaccctgaggatttgaatctcagttgtgaaattccttagtacatcataataacttgttgcttaagttccatttcagagattagtacaatttggtttggcataaaaatctattacatttttaatgatttttttttagaagatagtgatgagttctggcagctgtatagcagggccacattgtattgacggaaattgtcagatgaaaactaaattggaataagtttggtaggtttaaccatattatccttaaactcccgtttcctttcaagcaaggagcgggagtgtggattaagttagggtatttgggttatcatctgaaaagatccaacagttgaatcttcttatggctatgccaagaaatgttattctgatctgttttaacttttaacctaccgtgattgtgtcgtcactgggacattaacagagacttgacaagaaaccaaaaaaccatcttatccttcgaactccgatatcagtcacagtgagccttcaacgcttgatcatcttattgaaccatttaaacaaacagatccatagaatgattccacatcttaacttaaatctaccatattacataacttttttacccttgacatttctgttggggaacattgcttagaaactgttgtgtctggacctgcaaaagaaagctgcagctaacctaacagagaaacaagtaaccctttttatggtccttaaagcgtagttgccttgcattacatgaggatctttttttttttttgccatactggaatgaaaagatttatgcctctgggaaatccatccagttatcggacaactatgctgctgcttgtacgagaaaataggcgcacgaagcataagatctatgttgcagtgtttttaaaaataaatgttgattaaaataacagcgatgctatacagtgcgatttttttttttttttttactacgaatctacttgtttaaatataattggatagatattgaatttttttttaaaaaaaaaaactaggcttttgactcaattcaggaggagatagttattgtatggataatccgtgcggtacgaattcgcacaaatggtattttccttaaaataatttaaaaaatataaagaaaaattaggcagaaaacacctttcgtgtgtttgttacgaaatctattcgtaacatttagtattggtcttcaatacaagtggaaaagggccacaaaagcccaagagaaaaagcagtggtccaacggtatagaaatgaaaaacaatctcacctcacattgtttttctttttgggtcttttccactctgaggatgatagcgtcatttacctcttctgtatggtacatgttgggctttgattattgtttagcgaaaaatgtatattttttaaaaacaaatctccatgaaaaatttaattataagtaatttttgaacacggtaaaatgcaagtctgaattttcatgactcctctaaaatgagtaggggaaaagtaagtaatttcagttgttaataagaaatttcgcagttgatatttcaacgcatttaatttgttatgcgtgcaccataaacataatattaaccaacgaccgatattactttatcttctaaggtgagttgtttactttaaaagagacaaatccaaagctccaaggacgagttatcttaattttaagtattatcataatttgtatagctgattcaatgtttattagggggaaaaattgagagccacaccctttatgttgaatctgttacctgtccaaaccatccaactgatagttaatttgaactacattagcaataaagtaatatgttgcatgtccttcaataaatgaattttagttaaaagttacttttttttggaaaatttaaataaataatacttttttaataaataattcaaaaaatgggcatttttaaaataatttgaaatccggattgtcaaacgcccaaatcacttccgtcgttaatttggtcgttaaatgtttgcgaccacaatttccgtcgctaaatgtttgcgaacatgattccgttgcaaaatgtattatagactaaaatagagactgaaattagcatatgactttaaaatcaatttttaaatttacattataattttttcaatttttgaaattagtgttgcggccacaatattgtaattttttaatttttttaaactgaaatcatttaaaaatttacagtataattttaataaatagatataccaaaatcacataccttatttgggttatttggcaaaaacagaatgtgtataaaaaaaaaaactttcatttctcattttctgctaatatgtagaggaaacctaaaattatggtagtcctatttgcgaaatctattatctcctctgtctaacctaaaccttaatatataaatctagttcttaaatagataggagaaaaattgataatgtgaaagggaaaaatacgatcaaaatttcatccctttaatttttaacttttgttttctttttaggatttaattttctttgtctctcttattttcgctttgactaaacaaatacacactactctaatctcaaaccaatactgataataactacaaattaaggtggagcttcatttaagtattttttttattttcatttcaaagaaaataaaaaataagagtaaaaattatttacttaaaatttagaaaacattttttctaaaaatatttttaaaaagaggtccaaaatcgaaaacaacaaatctaacaaataatttatatatatatatatatattggattaaaataccccctatgctcctttataaaatttctatttattgataaaagaaataaataagagaccaaagaaaaaagatgtcgtcatcttaatatgggacaaaactttcgtacattaacacggtactattgttggtttgatttgcaaacaaaattggtaatagatttcaaattggtttgtaacgcatgcataaattttgagttcaagtgaatttcgagcgtataaactttaaacggtcataattttttatagaaatatccgatggaggtgtacgatatgtcaaaatgctcgaaattaagagaattaattaaaaaaatagaaaataacattaaattaactaattaaataattaagaaagtaaactgtttgaaaatttttgactgattgaatcctaaatcgtaattttgagacacttagaggcattttttggaaaaaatagttgaccaatttccctttggggagttgtccaagccttctcctctgaatttcagcgttttgatatatcgtacgcctcaatcggacatttctatcaaaagttatgatcgttcgaagttcgctcgacactgcgcgtgcatgacacgtgtcacaactagctgaaacacgcctaaattggacgtgtttaaactcgtctattttgagcgtgttacacagtcccagatttcaaaatattttcaaaactgtcccatttttcaaattatttatttaatttatattatttatttaaatttatcctttcttgatcgattcatgggatatggcataggaacaactttatctgctcgttgtaatgatagaggaacagttgaacacaaagcgatcatataattggagtctcaggcttttgcttcactgtttgtcagtcttgcaattttgtcttcactccaacatagtttagtttaggatgctgtcttcaacttggatattcattcatgaatattgtttataaattcctgctccaatggtactgctagcttgattttagggttaccttttacaggagcaatttggtagtttggtagatgcaaccaaggcaaatagttctcagccgcaacgttaactgtgtttcttcaagttaacaatgtctttatgtgtttgattgggaagccttgtcttcaccgccaaactaaatgtcactgcctaagacttatcctgacaaataagctaagaattttgtcttcatttttatcatagcaattgttgtgcaatcgataagataaacatcagaaaatttacacagatagaccttgagcacaccacataaacgaacttacatcacatttcaactcaaaaccctcaaatttatgaattttcctattacttatgtgatactcaatctttcaatttctaactaatataaaatttcacctaacactttacttcaacaaatataaacattgaacgaccactagtactctctaatatatatgcatataattataaataagtggctgagatattcagaattactagttgtggtcgtgatattttatttatcaaaagtgataagaagaagaaataaactgcaaaaggttttattcatgcttatttaatctgtaaaaaataaattaaggttatccattcatcaattatgttccttagtttcttcttgatattaacaaaggcatggagtgtaatattcttaactcttggataatacgtcttagatgtcctatataatagacttagcagtctataccacgatccttatgacccttcccatttgcaattaaacaaacggaatgggaattaacttttcattctgttgttctgaggcttattttaggcgccaaagattacctaaggaagactcatgttttgtaaaggccagttcagtagtatggattgtcaaaaatatcaagcaaacttactttcttattaagaaggtgatgcaaaagaagaagaataaagaggagcagcatcagaaaatggggaaggagctcacattagaggagtggcttctaaaatcaccaattatggaaaagcatggtaactgcaacggtgatcattgtgatttaaagcatggccctaactgtgattatccctcaatagctagagaaagtgcctatttttctgactgggaggaatatagtttgtctttggagcaactctcaaatggtgatgattattcaaatttgaaagatgaaaagtttgatgtaaaagaaatggggtttaatccattgactagaagccaaagtagtaaggtgaagaaaagggtgagctttagactgccagaagtgtcggagactatcatttttgtatccattagagatggattttaatgagtgttagtgcattaattagtttctatcctcaatctgtttaatgtgaattgtgagtttactagaatgatgtgtgtctctcctatcgtttttggaaagtatgtgctagagatttggagtgcaagaataatggatcaaaatctcagacatagctaagaatccgaattagtgatccacctacaatgtgattgtgactatttgtaaggttctaaactgtcaaataatatgtatattggtgtttgagaatttcttgcttccatgttggtttcattttaaggtggtttcaatatcagttgcttagaacacttttcatccactgataatatcctattctgttttttttttcccttcccagctgttttctgtttgttttaataggattccttttccttcttctctgcattactcatttctttggagaagttttccctttgttcctactaactaaatatgtatatcaggtttggttcttggtcagcagatttaacaatgcatggttggcatggcacaatataatggtagcatccaactactattaaaaatgttataggacaagccagaaaaagccatctttcaacttaaattataacagaacagaattaatcatttatctaccaattagatttgctaatgaaatattaaaaaaaagtgttagattgatgaggacaaggaagaaagcaaactgtgactaaatcaagtggtctatctaacaacccagcttgttaggtacaagttccattcatacgactctcacaagatatggacactataatatgtatgctatgcagagagcaaaattagttcagatccaagggaacacaagtcagaaagcgcataatgcgcagcaagtaactagagtcagcaatatgacacacaaacaacacgcaaaagagggagaaaaaacagtaggttggaagtgttttcaacctctcttttctctttcttttgtgtattctttctgactcctcctatgcaataacacaacacacaaagagttgggggggggggggggagggtggagaaaaagtctttgtcgtctagttatcttcaagtgaccctttttctctcagtctctaatcatttgagcaaaagaaagggatgcaactatgtgaaagaattgtagttgctctaatagttctttggcatgactagtggctcgacgttccactcttagaaaaagttcctcacttagtttgtcaccaatgtgggcatcaacaaggactccagacacagtcctgcagctgttggctagagcccttcctacttcacttgcatcatctggttggttcaccacaagtggacttcctcctttgaatacctcaagcttgtctatggcaaatgaaccattagcctcaaccacctccttgaagtcttgcaggcttgctgcatagactggaatgttaaaattgtctcgtttttcttggctaatcaatccctgaaatcaagaatatgatttactataaaataacatgttcatatcaattcataaaaggatagatagtgaattggtcttgaaattaaatcaagacttctgcttttgaaaaggtaacaaaaaaataaattctaacatcagtaatatatgacaatttagatctaccattctattaataatgtatatatactcaactataatgtgaaattatccttatatctatagtgttaagttggtaagtgagatttaccatgacatatgtttgagtaactgaaaatgttctaaagtactcaacacatcctactatgttggtgtcgttatattctgtacttcattgattacagttttggaatttgtatgtgtaacatggtagaggatgtttcttataagtacatgccttcgactgtgttcaaagacattgttgtgtcccattggcaatgatctttgtatgaaaattgatcagatgaatgcatatccattttgtctatagctttaagacatgatgatcgatgtgattcagtgtttgttctaagctcttaagatatccaaagcctaattgttggtcaacattatggaccacaagacacagccagccggaaattaattatcatttatgccgacatgatgatcaagaaatggacggctagatcaatataggggtggctaatcaacggctgggaccaatttattgtaaacgtggccagagaaaactcatgataagttggggtgatgcctacaacacttgagcatatttgtcttttaatctctacagtgtctcaaacttctttttggtcagccaatgggaaatagaggctatgtgccactgttgacacaagcaagcatgcataaaaatgtttgtgattatgataattacctcttggacaagatcatcccaagcatcctgaaaatgggtcccaaaaagaaggccagccccaccttggtctgtggggtccactgaagttctggccaagcaaactaagaacatggacccctctctcttcatctccactgaccttgccctcagaaagcctgccaagtctgtttggaattgtttcttgtaggcatttgctgtgctctcaccagccccatggataaacacccttcctttgttatatgcacttgacctcttgtccactacactttctggcacctgcaccaaagtaaattattgaaacaaaacgaagagaaaaatatgcactatatttttttttaaagactatgctaattatgctcaaatcgagtaagatctttatgaatgataaagttatcattattaatgtaacaataagctactattaattggtcacatccaattaactaacattcaccttagcaaattcaaatccatgcatttctgcttttttttattttttattttattttatgaagttggggtatcagactatctcttggtcgggaagtccataactaatttcccaaactattcatatatgtttaaggagtcaatctctttctaagatatttttttatatgcattggcatgtgatcaagtcctaactatatatatgtataagagataaaattatcttttaactatgtcacaccatgttggttaatgcaattctcctttagggtagaaaacactgcacacttttactgcaagaaatcagaattttgtatgataaagaacatgttatgtaaatgtgtgtgaccaataagcaccaaatagtacacacttttacagggggaatcccaactccaattgtgtctcttttggtgatcaaattctttgtgctggccccatatattattgaaatttaagatgcatgaaagtagaagaacattgggtgcttaatgcatgcattgaaaattactgtccaaacacgttacttgtttccctgaaacatggtccttttttcaaccctatagaccttgggttttctgcattcactttttgaccataaattatgacttaagcttcaaattaatgatggctttactatcttatcctcgggaagaggcaaatattcctttcattttgtcgtggaaataacagattagacgacaaaaactgcaggaatagagaatctttgattattgatgggtaggttggggagtaaattaaacgactatggcaatatcttgttaacaagaattgctttaaaggatttacgaaattagtgtaatcgtgatccaccaaaagtctccaagaaatgtgtggtaccttaaagttggacttctaatcgaaaggtttataaagatcttgggcaaacaaatgatgaaagatacacataaatgatttgaaataaattatgacttttcgtaataatttaaccggccacttcaattgcaaagagaaataaaccaattaatgaaaattgtagaagtaaaaatgaagttatctattgaacttactccccctccccatcacacacaaaaaagaaaaaaaaaactgcgtaaaataattaattctttaacttgagaatttttatttttagaaacaatcacataaaatataactttatttttaattttaaatatttatacaagacaattttattatgtttgttattctctatacaaaataaaatatttaaaaataagaaagaaaatttaaatgaagtgacaatttgacaactgtttattgaaaacatgaaaaaacaaaatcacaaaccaaaagtcagagttgatattaacaattaaaaaaaagtataaaaagagataagagtaaattacaccattctttgaaatactaccctgtcttttaaattttacataacccccttacaagttacaggatatatatatcaatggtataatgtgttttctttagtataacaaaaatgatagtgtaatatattttaaataaataataaaggtacgtaaccctggaaaaattaaagacaaaagaagtatcttgtgaatttggaagaaataagaggggatatcatgatcagtgtaatatattctaataagaagagagatattatttttacttttattttatgaaaaatacattataacttatttcttgaaaaaaaaaatcctaaaatagtatgtactaataaattaagtgttggttacctgagatagccagtgcaaagagaaggctgagtgaaaaacatcaacggaccttgccggaaaaagcctccggtagaaggaaccaggaactccggcggcgaagtaggagcggtggttgttggcagcgaggcattcctccatgctaacggcgtagttggcgagcggaggaaggaggtggaagagcgtgttgaagtcattgctgggaaggtctgagaagaaagccgagaactctggtggctgccaccccaatgcctcgtaccttttcatcatgtgctttattatcacatccaccacgtttatggtgttgctcccacacgaacaccccaagtccgccaccacaaatgccacctcacgtccctcaacaacttcaactctgtctagtgtctctctcagaagatgaagcatggacctcgcatgtaaggcctgcaatatataaggtggattcgatcattaaggaaaaatatcacatatgcatgttttatctactgaatttagtttttcttagtaaattaagacgtagcgtttgtcagataaataaaaaaaattagtttttgtaaccaacaaacatatgatatatatatatatatatatatatatatatatatatatatatggtacctgtgcttgggaattgttggcatagctggcttctcctttacctcctttcatactaagcaacttctccagttccatattggatacaacaacattgtctcccattggagccatatatatatatatgatccccaatagctgtgagatggatgaatgaatgaatgaaagggaaattgttgtatatgaaaaataaagacaagagaaagagtatttggagatttgagtttggaaaactgagaggctagtggtgatatatatatagacagagaaggggggctagctagctactttttttcttcttctatgtattatgttaagcaaccgggcattattatttttgttgttgttatcattataaaaaaaaaaatagttaactatactacacaatgggaaaagaaaaataataatactaaaaagaaacttgaaaaaaaggttaaaagctaaagtgtgggcctcgtgtgcaacacggaaggcccaaactggcgccggatctttgtattcatataagctacatagaatatcgattttgtttctgaccaaaaccaaaaaaagagtatataatttgttagagaaaataatattgtattcgcttgttgtaacaactaattataccaattctattatagagaatatgtcgtaagattcgacaaaagattaaggtttcgatcatctatagctatttttaatggtagaaggattattttattaaataggtagaaggatcttaatcacacacaaacactaaagtttatgagctatgaagtttactgtgagcagacgatctatattctgaattaaagtttattatagtgtgtataaatgatacagatatcttattgcattaattaatccctatatatttgatatcagaatgccatatcggttatattatctgcaaaaaaaagtactaaatcataagacagtaagtgctatgcaaagttttccatcatggcctttttcactctatatatataaaaaaaaacattgctcgatgcataatgatacagctaattaagcagtttagattaaaatataatgttagattattgagtaatgatacgtattttaaggaatcaattaactagctacctatatagtgaaaaacaaagaaggtgataataatggttcctaaggctacgtaagtttcctttcatttgcccaaagtttgccatgtaaatagcaacttaaattgattactctttactaagcaacttttacaattttttattaattttagtcttgtgaggagattgattacttttgtcggctgtttagggctttattataatataaggagagtcaaagtaatccattaaaagccaaatgatgattaattatttcattattaattaagtcaccaccccagaaatcaaggttcatcagttagtacctaccaaaacgaattcattaaatggaatggtatttcttttcttggatttaaatggaaatcaattaagttataatcaacttcaagctaccataaacatttactccaaggctcaatttacttcttttttttgggttgtgatcgctttattttatattcatataatataactctcatctctttttcgtttgctacttttttcttcttcttaatattccattaatttcctatttttcctaattaaaggcttagaaaattaaaaccctgaatttatggataaaaaaagacggttttcacataacctttttgaagaaaaggtaaattgaaggttttcctaaaagcatatataagagtatattacttttctgaaatcacgattcatgttcatgtgcctcataatcggtctttaattagttggtaaggggaaagaaatgcaacaagaagcttcaaagcagatgccccaaaaattcagttgcttcacaactacaaattaattcagcaatagcatgcattgcatgtcatatattgttaattctttttttacatatggtcaataaagttctcttacatcttaatatgtaaccgtgttctctcgtataatgaagacgttcaaaaacagttgagagaagtaattgttctagagttttatcggtcagaagaaagggtaaaaagtgttcaaattgcaaatggatttccatatatgttaaaataaatgacaaattcttcagcttcatgacctggttttagaaagattaaacaattgatttttatcgctttcttttgtttattaattagttactgttttatttagtttttcctaaaaatagcacgataaagaaacatcgattaatcatattgttaataagtctaacataatattcacagatataatttaataccttaaacatatatattattgatcagccttccacttttgatatttttgtgaatttaaaaaaaaaaatacttgcacttttggttttagtaagtgtaaaaatattttattgagataaaattagtttgctaatctttagaatttaatttttatataatatcaacaagaattttacactacattgtagatcaaccaaacataaattattattagtatgattattaagattttttttaaaataaacttatcacataataattagtaattgaatgacagttacacaaattattcattttaaattttatctttgaaaaaattagacttcaaacattagttaagaaaaatacttgggtcatacttatataaagcaataaattaaattgtagactcataccaatatgtcattagtttgagtagcattgaatttaattttttaaaataaaattttgaattggaattttgtggatgagaaaaatgtgattagaaaaaaatatccaaatacatagccttacatttaaatatttaaaaggttattatccaactttatatcatataaataaatttgttaactatcgtcaatcccaattaactttatattacataaataaactttatatcatatttaaatatttaaaaatgttgatgttgatagagctaaagaaatatttactatataagcacatgcatgtacacataccatctcaaacttcaaaaaatatgaaaataaccgaataaaactataagacatttagtgaaacaaaacaaaataaaaaattgtcaaagtaaatataaaactgatcaataacagaacctagctaatatgaagagatggatctgtcaagaagaaggatgatgcagtaatattctttctcagcttggccagcacacatatatgtctcaacaggtatacagtacagaatcctgaatgtcgttcaaaaggggttagttgaaatgatgaggctaggtctcaacgtggatagctttatttttattttttatggtaaatatgatttttattgtgctgtgtttggactttggactgcattgacgccattaattatgtttagttgtcacacctaggccataattttctttttttatcttttttagagaatttggtggaatttaaatttattatacaaatatgcaattacttatatacctacaatttagtaaacgattcttttaaaataaattcatcgaaccattactttctttatataaatttaagggttaacggtgtttttagccacaactccattaccatgcatgatttcatttttataccaagcggtcaagggaaactcatgctgtaggcaacgaattaatttaaatgaaaatcatggtgcctaaccacgaattaagttgtgataatgaaatcatgaattaattagctaggggtaacgtttgtctttgatccatggcttctccatttatcataaaaaaattgcattaaaaagttgtgagtagatcaccacatcaatgttttcatataagttgtgtttagtgtttatgactttatcaaaaccatttttatatatataaaaaaaagcttattaagttgtgagtaaaataaaaattataataatcttcttaaaagttacacttttttataataacttaaaattaaagttgtaattacgaaacgtaatttcatcacatatataagaaaattaaataaataagtaaaaaaaaaaaaaaaaactgttgaaaaggccatgcatatctatcctcggattcttcattataggggtcaaaatcgtagattacgaaatatataaagagaccgatcgagagtgggggtggggcttcagagatgtcatatagctaggtttgagaaatttatctgtatttttcactaccactatattataattcgtcataaaaattaaaagaaaaaatacaggcattgccatcaactggtttttgaaagtttttcctccgtgtacaattccatctaatgcaaggaaacgtaagaactttgtttttataatttcattaatttttggactatatatataggagtatgctctgaggcttaatttcatatctaggttgaatgatcctagaagtgcatgtaaaattacgcaatctgaattttaaatgatacctaaaaattgtaattaactaactgtatcagttatatattggcccacaatgtatacttattttaacagtttcgtagggtttgacacaaaactatattatatttaagaacaagaaaagagaggattaacttccacagttcaaatctgaacggcgcaaataaatgatgtgattttgattctctcaatctatttttctttgtgcgtctatatatatatatatatatatatatatatatatatatatatcgagaatataactcaattataaattctctgatatatattttcaattcctactaaaaacacacacaagacatagaaatagagccttgcataacacgccccaaaaggttgtgaaaaaggcatcatatataatatgacacttaattctatcctctgaaatttaatttacactggaatccaaaaacttggaatctttgtcatctggctagctaatggccccctccttctttttgagctccttcttcaaagtccaaatccaaaccaccgtgatagtcgccatttacgtgaaacaatgccgaccactttatacattttatattatatttagcatatttgattatctcctgcatattttaattgtcattgtatgaacattataataatctagcatctacttatatctcttaattgtgggtttgttttaccttaatcccgcattttgatacatgttcaacagggagcactgatatatactctctcacaaaggatcagtagtgttggacataactcacgccaattcaaacacaccctaaaacttaattaaaatcaattggttcatattcatttggataaattgaagttttagtttttttacatgtaatactttaatttaattcctatagaagaaattatacattttcatatttatatagaaaaacattaattcatatgaattgatacctatatattatttgccaaagttataatggtatagatttgatccctatatttgatactattttttattttattctctacattaaaaaaaaatcctatattaaaaaatttatattttagtccctactctacatcatttattttgttttagtttctacatgaaaaaaaacttgacatatgtgtgcttgcatgtatgacatgtctcaattcaagataaaaaatgtaggaatttctaacaaagttataactttaataaacattagatattactttgtatataaataatttttcatatgaatatcaaaatatagatttttttcatatagagattaaaacaaataatgtcaaatacaagaactacatttataatttatccttttcgcattcattattctttttattcaacatctatttagattagtggattaggaattatcactactcatatttttggtgaaaccaaaataattacgtttgtgtaggctacctttagtaacttaataagctaggtcattcaaccaaagagaatgggagacttttagccctaagagagatgtcaaagatacggtgggatggtcaaaagtaagttagtagttatttcccttttgcatatatgcttgtgcaacggttcgttgcctagtttttcttgtgtgtggcccttctggttcaaaacatcagatttggacttttgagacaggtggatgcatgaggccttataataaagtagaataaaagttttaatgagaatgcttactcgtgttttgatgttaatttgttactagcttaagatcttttctcccaacagtgtggttgtataattttaaaggaatatattttggttttgcaagtgaagattagtttgtggtacgttaatgtctttgtgtaaatttagctacgcgcatattattttagttcaaaaccactacggttaattaattacctattaactagctagaaccacaacttgatctaaaattatgaacaaattcttctagcttcctttgtccactatgaatttcatcatttttgtctactaccactacgaaagataaaaggagaaaacatgttacgtagaaaagcacatgctcggagaacttttgaggtccaaatccaatgagtaataatataattaatatatatatatatatatatatatataaatatatatatcaaacactttattaataccttttttttctcttcatctctccttttatatcagatcatataacctattatattcatacttgtacttccctctctatttctctttagatgtcttaagacttaggttactataaataatttttcaaatccaatagaatagcttgtgtgcttttgatcttgcgtactagtagctctgagaatttatcatataaatacattaaattggtcctttaaaatatgtatacgtggcatattaatttaataatttattcttttaaatgtcacatagttatgataatctcttgcagcggttataatttgtatacgtggagtattctcttttttattacatcccacgactctcttttttcacatcaattttatctgtaaaaaaatattaaaaaattgtggaattttgattgagaaattatacatttgtaaaaaaaaatcttacaaaaagaaaagtgagaagaaaaagaaaattttgaaatataatatatgttagagaaagataaaaacataaaattatgtataaattggtgtaaaaattgttatatatatatatatatatattatatctcattttcatttgacaaatattaatcaatgtccactgattaaaaaattaaaaaaaaaattattaaaatacataaaattgtgttatacataactttttttatattctcttataacattcataataaatatttttaaattttaactaggatataattttaatttataaataaaacttgtctttcctatatattctctatctagcctataggcatctagctttatgcccacgcaaattctaaaggaacactaatctaaaatatattgatctgtcactctagaaaggagcaacccccagaattattcaaggatagcagttattggtatcaaacttttcaggcaaaaaatacaccttaagagcggtttgtctcgacaaagaagagcgtaaaatatgattttttttttttttcctttcacaaaagggcatttattaggtacataggagtatatctctacatatccacatattgcattgatttttctatatcaagccatgctgattggctaacagcgtagaatttcatctccaattaagtgatcgagtctaaactttgaagaattgccagaattgaggtaagcatccacatgcctatatatcagttatataaaattgataggctattcagaactcagtgtataatttgaagttcttccatgatataggacccggcatggtatctcgaattcaatgatattgggaaagaaggagatgtacatgaaactcaggacttgcaactttgctgctaatcatacatatatctcggttctaacttaatcaaggagtacgtctcgagttaaattcaaggggaatttttttttcgtctgcgatgatagtcccacttgactcaatctagattaatcatactcctatgtctatgtagttaattttaaacccaaaaaaaaatggtcacaaacacgatgctcatgcaaatggtttatcttttccaatgtaagactttagtcaacgtcttgatatcacgaagctacttcaattcctttgtctctatttccgttaaggcgttaactatttgtctatactcacaaacttaggccaccaaatacgcatcaataaatggagatagggatgctacttatagggatcgataaaagaaaatactgtactactaacaacgcttttttagagtggtagataaaaaaaaagattagttaaaaattttatatggaaatttgtcatatttttctcttgataaagattaaataggcggaaccctattaaaattcgtgaacatcaagcgggagataaacaatattttatgaaaatgtaataccccccccccacacacattttatactgtactatttgtaatagcaaatgaatcccatgaagagatctttgttgggccttgtgaatcaaacctcagcagaaagaacatggcccaacaccccctgtttgatattcgcatccccccaccttttcatcataattttcaccaatgtttttcattcgaaaaactaattctggagctgagctagattttttattttattcaagaaagtttaaaagtattactgtaaaaagatgaagtgactgataaaacaatgtttaatactattagtatttagtagtcgtactgtcaagttgtacaaaaacaccctgtcgccttacacaactagtttttttacctgtatgatgcaagaggaatacaaaaagtttgagtgtctttattttgcacgtttatcgatgaattattggacaatttttattttaaatacgtttgaaatgtgccaatcattacaggatcaatatatcagccgtattatctaacctgaactattcaacaatgtgatttattcaattacgaaaataggttagataattgttaaagagtatgaaaaaatttacttataattttattttttttattcaactaacgcctcaattttatcttaaatgttattatttttatttaatgaaaatgaacaattgagtaatatttactaataatatatttgaaatatataaaaccacaataaaactaatactgatacatgttaaaattaaagtataatatttaactcatactattcacccagtataatttatttaagtataaaaatagacatctacaattattaaagagtgtgacaaataataaaataaaaatatctctaatataacaatatgtgataaacaaagcctgtcagtatgtttctttgaaaaaaatagtacctaatgtaatttgtccaatcttatccaaaatgaacaatttaagacacatctttcattcgaaaaactaattctagagctgagttagaatttttttattgagaaagtttaagagtattactatacgaagatgaagcgactgataaaacaatgtttagtactattagtatttagtagtcgtaccgtcaagtcgtacaaaaactccctgttgcattacacacaatacagagtgcaaatgaaatgaatctcgagatcgacccactgcaagagagttttttcatgactaatgatggacgcgaagttagcaggattcaaattcttaacccaaaattcagcattaagaaagtagtttcatgtctgaaaagagaagtgaatatacgtgactcaatcaatatcattttattattaagtggacgatttgaacatattttattaaaacacctcccgtaaacaacccatgaggccatgacccaatactaaagctcagccagcagaatctagaaacaccttggcgatagctagaaaaatcatcacgggtcgccaaattgataacgaaattgccaaggttatgcattttagaagaaatggcttttgtacaaatgaagtatcttacaattcagcaaactaagggaactacactgatctaattcaaagataataatgtaattattgggcctaaagagcctaatgcccaaaaaagaattatacagaatgaatatctatcggaaaaagagctaccaaagcgaaagctaaactaagcagtccacagattcagctacatattttacatcaaaagcaatttatgctgaaatgattgaacattcttgtacgaggaggcaatgttgctgcaatgtgccttataatgggtctcaaatgaatcttaatgcatgctcaattacccatacaataaatatcctgttcgaaaccccaccaaatacctgcatccaaacagaagcacatcaaagatcagcacaggaactgggacggagagaatcaagacccaccaaataccgcttttaacatcccttcatatatgtcttcaaaattattaaggtttaagtgtggatgcatcatatttcaggcaaaaaaggtaaccagatattataaaactgcatcgtccaagtttatctataacaccaaaatgttatgcattcttcaatttacctagttaactattgtttcaggctttatcactaattaggggtggatgcaaataagagaaaagaaggaaatatataaatgaaaagtagattcacaacttaatgtccatgaagctaaaagggctcatgtttgttgcttcctctatattcatctgttcttgctcggttccaagcttgaattcacttctattcaattcaggtatcttctctcaaaaaatatcctcaatgttaagttcaaaacctttaagacagtagtaggctaatttttgcttgaaatgacttgaaagtcctatttgtttgtcatgattgttaatttgatatcccaaatttccaattatttttcccttgtttgttgttccaatttaattgctttatcatagagatgaagaatgtgattatcacattatcatgtttggattctataaattttattattatttttgaaatagtagaaactagcaggtttacaagtctaagcttcagaaataaattcaacccaaattcaggaacataacccccaacccaatgtgcccacgattttactaaggcgcacaagtgctctaaggggatagaaatattcagtagatacattgggtaaaaataagtttcagccgacaatttggacaggtaatgggtcaaatactcaccacgaaaattgcaccatgtaagaatcacaaaacatatacgttcaagacataatcaactgattacaggttgaaataacttcttgaattcatcataaaaccacctgcaaaacaagtcaaatcacttgagacacctcaaaagtcaaaacaaaaagaagaaaaattgaaaaggccaaaatatcaactctgattttattcagactttgtccagattgattaataatagtgtggatataccagtagattataatagctacactggtagtcggatagtgaaggtatgaacctttaaacgatgaattcaatatttgatttcaaaaccagtagttaagcatataaaacacaaaatgatgcaagaaacaaagaaacagcaatgaaatagaatagcatttatttgcattccaagcttatgaaataacttcatcagaacataaataaatagactagaaaagccacgtatttggtaaaacttggactaactgaatgccaaatatggcgaagtatctattgggttagcccatatgtatctctttttgttaatggccagttgaagtaaagtactcagaatagactcatggattatgttggtcttgttagccctgtaatgttttccgagatgagtaggttaaccgatgttgttatcaaaagaggccgttaccaaggtaattaatagtgcaatagcagcagaatggccactgggcattacagccacatccagtgttgttaaatagccactacagcagcactatagtgcttttgctttatggaattctttggatccacaatcatgactccatccactattgcggcagctatgggagttgtggttgaggcatgaaccctgcatcctctagtcatcttcggtgagtctccagccaattgaacttttgaatttataatatgtcaattttaggcatattttttatttgcatgcaacttatttttatgcatatatcataattcaaccactatgtgacttttgttatttgcctgtgacactatccgctaaatgatatagcagattattagctttccgccattttccacaatccgcaattgataacgctagccacattgttgtatggcatttttggggtcacagccaaatcacaaccttttcacgcataatcagagcatgattgttatgggcttcaaaaacccaattttgctcctgcagtagtgttgtttaggaggagggtgggttaagggtgaaaatgacatttactctggtcatgcataaaacaaaaacaaaaacaaaaaaactaccccccagcagcaacgcaccaacaccatcctctttctttctcttgtcaaaagacatcctcttctcttgcccacccacccacaccagagatgacctcttctccgagcgactgcaagtacagtgcagactgctcttctttcttccccacattccgcctgtttccaaggtaattaatacgacaccatagcaccgcagagcagccgctgggcactacagccacatccttgcgtggcattttgggggtcaaatctgtcacaaccaaattgcaagattctcacgtgcaattaaagcacaattgtgatgtgtttcaaaacccaattttgcccctgcagtagtgttgtttaggggagtagggttaagggtgcaaatggcaattaccctggtcatacataaactaacacacacccccccccccccccccaaaaaaaaaaaaaaaaaaaaaattcaacagcaatgacactaacaccctcctcttctataaagacgtcattttctcttttcacttgccccccaccctcactcagcagggacaactcttctgcggtgactgcaattacagttcggcctgctattctttctttgccctttcatttcagtctttggcttccagaatgtgctatcctacccactatagcgtatctggggttggtcgcaagattgattacaagggtttgcgtgagaatgaagggagtttccttcatcatatacatgaaagtccttgtttgtgattgtctgccaggttcaattgacaattaagctttcttgtattcattattttcctgttaaggtaattatctaaaatttacggagtttttcccttttgaaccaaaatttcatcaaatttcatcaaaatagaaaagcatgatatattcttaatgctcagtcatattggcaagcagcatgaaaatgtgtttcaatttccaattttccaccaccaatgacaagcctaaacgataattaaaagcattttatctcccttttcatactcagctatttgtttcatctccctgttttctaccaagaataccatgcgataaattgtaatcatattttctacttgatggctgcattacaaatacgaaaattgtataaaactatagattgaatgaaacaggcacgaagaaaaacaaaacaaaataaaaactctctagaatgatggatgaatataaagaaacaaacctgcaaaggaaaatgggctgcactttagaagtttcctcaattcctaactgacatcgcctgtcattttcttgtttaaatttatcagatgagaggacttcacatggccctcgaatagagttagccatttcagttctatcactattagattcataaaccttcaacaaagaaaacatatgtataagaaaatatccatatatatggttctgaatggtgagcatgtccaagatgtgaagcattatcatttgattggaatatcaaacaaaatagaaattaactgtataggttacaagttcaaaccaataaacagtttatggagtataagagcatgtaagccaatctagctttagataaaaactgatagttaacataccaatgacaaacttccacacttgcatgaatgcatttatatccatctaataaaaaagacatctattttttataattttatatataaagctgtatgtataaaaaaaaaaaaaaaaaaaatacctcgttgacttcagatatacacggatgaccaatattccctggcaaatcatcaggaaagtagcagtttgtcaccttaacccactttaacccagttttgcaatcttcccacatagactgaaaataaaaatggaataaatccctatgttaaaagttctataaatttataaaagtaacattccacacaagggttcaaatcaatcaaaacaaaacagaagcagtaaagtacaccaaaaacaacttttttgttattcatatctacttcacaatttttcagataaatttctacaggtatgacataaccgactgctagactatattggaaagcatgatgatttgcttgcctggagtttagaaggagttagtttcccatggctggtggggaaaagagcataaccctgcagtctatatgttactccatcaatacaacaagattggtaatactttttcttatctactagttgtactacatcaccaatccattctaccgcatgtgaactatctgaagataatgcagagtgctgtctaccatcagtattagttccagaagttccaacaaaatttgcaagtgcagcatcttggtcatcacgcttaatatcataagttaaactttctcctccatgaaattccttctgtttattattcataatattactgtcgacatgcttatctgatgatacttgagcattgtcttgtgacattgtatgttcaacttgaaaatcttgtgatgattgcaaattttcacacttagctggctcagataatttaggaaaagactcagataccgaagtctctttaccagtcaaaaccttagaatttatttgttgaacataattttcacctatcaaacaaggggaaggactagaagctgcactaagagatttcatagagttgtttggatcaggcttcttatcaatagcttcaatggtggatgaaatgtcagtcccttgcatatctttggtatctggtatctttgattcagatgacaactcaacattgtaattgccaccgcaaacagtttgaacagagctcccatttgttgctaacgtctgtgggatggcctttggatctacattctctactttcttctcagaacatggttgaatgcctcctgtattagaaggcaattttggaggtgtgtttgaggatctcatgacacgaccatattttggaggcaaaggctttccaccacttaaactcaagcacctcatacagtgccaatcaactctattatgaattcctctcaagactgatggctgcaggcacttcaagtgaaatcccttttcacaagcatcacagagaagtacagtatcaacctcattgacactgagctcacacatctgacatgtgaaagccttattcatataatcccttgatggaggagtccacgtgggatggacaggaagctttggttgtaacactttctgaacaatcttagcaatgtcagtatgactaggaatcaaaggaggctgaactatgtttgtggcccgcaatggctggtgcacactaggtaaagttccagtggctgtttgagtgataaatggtctaaagctcgggtctgttgttaattgtggccctgcccttgatacagttacatcaggtgttccttcaaccttgacagaattctgaacaggcaccttgttttctgatgcacttctagctaatgaagcagcttgagtctgtatagaccatgttggagcattcaccaaaggttggtttgctgataaatttgctacagttaaaaagttctaacattcagttgccagttccaatttcatgactaaaatgtcataagatacactcatacacattataaagatacaatagagaatagactaccacctttagctggaaaaaaaaaaagagaagaaaatgccaatagatagttaaaaccttaatgccagctttccatgacagttacatacaaataacagagattgaaggaggaaaaagacaaatgaatgtagtttaattccagactctttaaagacaaggaaaagggagcaacatctgctaggagattatatctattcaataacctcacaatagaccaattcgcctagatatacaccaattcagtcaactttcaaaattcatcatgcatcactccatggttaacattgaataaaacctgtaagtattcatccataaaattacagcactttattctgaacattcatttaatgttatgtgttttattgcttcacagtaaaataaaatccatatcagtgtgttcaattcacattctatcattcaatgtaaacatattgcactgtcaatcattcatcaatcataaatgtaactctaccagtccttggaaattggatccagtgaggagcttcagaggacaataccttggacttgcagcatgtaaggagacccatttgatcctccatcaactttgaactgtgggtgttcaactttaggcaatgctaaggaagatgaatttctccccaagtgactgccaggcatcacaccagaaaccactggtggtcttacttcattgccgatcacttgatactgcaatgctgcagaagatcctgcagaaacatggccaggaatagacactacggcacccatagaagggattgatgggtggcttgatttatcagaaggaaaaattcgaacatgtgatggcacacgattgtcaactggtccaccaatgtttgttggcaagggctgagaggtgtgagttgtagaaggtgtagaaggtgcagaaaatttctttgcttcttctatctgttaaccaaaaatgatagtaaataaagagaaaataaaggagaaaaaactaaccaaaagaaatggcatagcatcattcttagcataacatgcatattataaataaattaatgctcttacttgtgcatgaagaaataaaatacttctctaattaacagagttcaacattccaacaaactcaacaaaaagcccacttgacaaggtagtttaagatcaataagagtggcaacacaaaattaaccgaaaaataatccaatactagcttagccaagccaagtaaataaagctcattagtatacaataatctggccaaggattcctttttcctccataaaaaaacatacaaaacaattgcataagaatcaggtgaatttcgtgtgctaggaacactacattcttagtgcatgtttggtaatgcattgactacacacgttacgctcgttttcaggtcaatattgagaaaaagaaaaatgtagaagccacacgtcgttgcttctaaattacacgcgcgggatgcatatccaaacacactgctatcctcattttcctaactcggacacattcacaacaatcacgatagaaataatagtattccttaagcacctatcataacaaataattcaaaacaaccaacacacacattttaacttgagcagctcgcttaacgagatgaaatttcttttaattctacatatatgttcactgaataacaaaatgagcaagtcaaaagcatggtgagtgttaattgagcagagagagagagagggttggttaccttccacttagcatgggaatacctctcggcaatggacatcttgggagttcgaaaccctaatctctggtccttgagcttggagttcaatccgagatcctcaatgacggtgccaatagcttccctggcgacaatatccttcggagccaaaccctggcagaggctggcgagtttggcgcgagcctccctcatgagctcgacctcggcgtcggagggcttcctccccgcgcgcaccgtggccatggtggagagaaccagcacaatctccgccactctcttcaattctgcgccatggtcgaatttaggtttcttggcgcagcgctcgtcggagtccccgttctgaagaggcggaggctgctgctccagctccggctggggatcggagacggcctcctccatgggaggggaaaccctagagagagagagagagaggaagagagggaaaggaaaagaaagaggtttgaattggaagggttaattaaaattttggcgggtaagtgtgtgtgtttgagaaatgagatggaagaaggcgtgtaagtaattaggtagtgagtagtgagtttgtgttgaaagaaagagaacgagttgagtttggatggctgatcagagcgatccctagcgaggagagagagacgcccacagaatacaaaaataaaaagggcttttggctaattaatagtaacctctattttaactcctccccacccaactcgtaacgcgactcaccgagtttccactttccagatcaccatttaatataatgttaattaccattttacttcgtatagaataaatgttaagatataaaatatttttaaatgtataaattgttttcagatttatataacaattaatttaaattgagatataaagttttttttaccaatagtaattcattttgaaaattattaaaatttaattaagataaatagaggtaaaagaagacaaattgaaatgaataaactttttttttcatacaaattaaaatggattaaaaggtcaaaaggtccacatggccttgtggattaatgctacccctactctatttgccttaaatttaaaaattcacctcccccttttttttatgtaaccaaatataaacctttttcttgctaaatcatgtacattatcacgagagttgaaggtggacacacgttcgagttgacttgacaactcaatttgtcaaaattagaggtggtaaaagaattcatttatttgtgatttgttttgtccatccatgtaaaatactctagccgatgacaagttaaaaatattctaacgaaggacaatgaaattactcaaattaacattgagttgaaaatattttgattaatattaaactgaagttactttgatcgagatcaagttaaagttactttcattgaaatcaagttatagatattccagataaggtaaaaggtaatgttagtatgattcatgcaatcaatgttcattcattttttttattatcaaatatctccatataatctagcattttctgaaaaaagataaatctctaattagtaggcaaaagagatatccttaatgcacttctaataaagttggttaaagatgaaattaaaatttattcgtatattcttttgagaatttgagacctaaaaatcttactggtttgagattgcatttaacatgactcaaaagtaaggtttcggagttctaagttaacacacacttggatatcaaagataatccagagcaaacaatgacatcacacatgctaagacatctaatctacgatgccatacaaaatatgaaatcgtaaatataaagtgtatgctaagaagcatttcttattaagctggaacaagattgttttctgtaaatatacacgtggtctataaaagaaaaatgtatctatgttccaacatactgttattatagttgtttcgcacattggatagtagtgaagaaataaatgtttttattttgaaaaactagtttttgttaatacttgggaaaataaaaatattaattatgtatgatgtatccaaacaaaagttaatatattattttcacaaatttacatataaaaataccaatccctgattaaaaaataaagaacctgcagagcattccaaatccaataaggacgtttgactattggcagtttttccatgtaatcttcaggacagcatgatttacaataggtaaaatccagagctacaccaatgttcatgtcattcactcttcatagccatcttgataagttgctcattaccttattaccacttagtacacaaagcagacagatatctgagagcatgtttatgatacataagctggtagttgtttgagatagtagtctcctgagaaagaaacatcactacacacagtaatccatgggggagcatacaatatacgagcactcttaatggcaaaaccattaagaattggcagtggaattcctctcaataactgcgagtttaggtatggtatgacaacggtcttgaggacggttgatgtcactgactgtaaatgtttacacagttaaggagtaagattcaacataatagcctcgatatacaatcactaaggtttaacaatcatatatgtcaaaatataaatggagtggttgtgcacatgagatggagttacatatgtgctaaaccatgtgcagaattttgatttatgaatgaatcagtaaagtgaaatatgaaaggctaaaggttgtaaatgggttgaaaagttcttgatggttggtacacgttatccgcttattaaattattgccaggaaaaaaagatactgcatgtctaccacttccctcaaactatggcagtgttgtcatttgtaatattttggaaatagaccaaaacataaaccggacaccttgaatatatcatatatgtttaacaaatggttggcaactgtgtcactttcgcatttcacatgacaatgaatcaagtttgtataccactgtggtctctctaattgaaacagaaaacactcatgggttgatctagaatagtccctaaaaatagaaggaattatttgttcgtattgttaaatttcatccaattagtagttaaggtaatttggccatacaaataaggccactagaagtagcactggttaggagagtagattgcatggtttttattcctatgaagaagaggggagaagaccaagaaggacattggagaaagttgttcaaaaggatctcatgacgaatgatatctctgaagattttggtctttaactgggccgaatggtgtcatataatacatatagctgactaatgggataaggcttttgttgttcaatttcatatcaaaatacaaagctgaatacatttattccaatatacctgaatcaaattcatgtgcagtttccctattttactccatttcaagtacgtggaaaactttctcaatttaagccaaccagcaagattgtttcctacgatttccacagcacaagaagcactaaaatcctgtaccaataacaaagattaatggacttgttaaacaagataatgatcatgtgtcatggctacctctttaaactctacaaaataaataacttttaagaaatagtataatcttaggcatggacaaaaaaaagtaggcaaatctgaaaatttaatcagaagatcaatacaaggttatgtgtgtgtgtgcgcgcgcgcgcgcgataacatgatgacaaaaatggtagaaagcttgaatttcatatagcttagtcagaatgcagacacagtatattatgagggatggctatttaaacagtgtaagcttcataaaattttaaactatctacttcaatattgactttattaaagcataccaccgagatgcatgcaacaggtatgacttcaccatcttccagaacatcaattgttatgtctatgaaaatgttgacaccgatatctttgtttgtcacttgtatatctggtggagaagatacagagatattaagattcatgtcgtcatttggatattttttgtataattgtggtataaggaacttccattcagcagtgttcaaaagggcctgatcagggagttcatcaacaatccattgcatactatctgcctgagcacaagaacaacaaactatcaaaattatatttcagtttatgataacgtaaaagcttgaagtgcaaaatgtaattggagcaacccaataaatacataaagcctaatcaacatcagcactactatgttaatctttttctcataaagcatcagcccaattaatacataaagtctaatcggcatctgcaatacaaggtctatttgatgtcagtaagtaatacttttttccaaatttagagcaattccaacaaaaggttccatgaccaacctaaacgattaaagaactcagtccactaatatgtatgaataaatgatgcaagaaaacatgcaaactgtggaacaacaaagaaattgtttcttctgcagattctagataatgccaaagcctaaacaaacaagctaatgcattacaattcacttgaaatataacggtggaagaaatgcaacaagtaatatgatgctattatacatcacagatatagcttaaaatgaaaagtggaagggggaaaagagaaaactccatttattggactaagcaatgaaaaaaaaagggtaaaaacttcagaaacttacagtgaaataaaccaaggaaccggatttgaaaacactttcgtgtaatgaaattgttatcatctttggtgaactgtcaccacaggaagcagaaaggtctgatcctctgcggtaagcttgaggtaccaaaacttcatttcttcctgtgaataaaccattaatttctaattcaatagcagaatcactcagcactggattgtccacgaaagaaacatttagagcagcagtttcgtccaatgggattgtttttggaagagattgcaataaaaggtcaagagttgatatcccctcatttattttcttagaaattgcctcttcaactgcagatgctatatttcctgcaaaagcatctactagcctgcaaaaaaatagaaatatagctttatattccccagaatagtttttgttgcagaagataacggaaacactcttatctggcctcccagtttcaggtcccacactaaagattgaagtattggagtaaaattgaaacatagatctgggactatagctgttggccaaaggccttcccatggaattgtgaagccttaatcagcaataaaagaacataattgtctaagatagagcatgtgtaagaattcctaattatcaaaaaccatggcttaagaaggttccttacacttggtaaagccaagctgctccgccatgcaactttatagataaatctctaacatgacatccagaatccaggagaatcaacttaagagttccttcttggttccttaaattcacagtaagtcccacttgcaaatcattaaccttccaacatagcacagcactatagaatgaggaatataattgactaaacaggtataaaaaaaaaatatttgcacaaaagtacattactcagggttttggctatcagatactgaaatacatgtcttttattgtccatctcaagaccacatctttttctttcttttttaatatctccattccctagtttcaattatactgaattggtatgccttaacaagttggtcttactccaattgcaagacgccgaaaatgcaatttcaaccataacctccttatagcttccatagtagtacaaccaggctaactaattttttataaaaataaccaaattcaggaaaacatttattatttagttcaaggtcaaactttcttaattaaaacacaatgcaacaaagcaaattataagccaccaagcaaatcggtgtaacttacaaaaagataaagagtttaatttttacaatcaaccaatcagaaatcatggttaatataatttttaaagtagttattataaaagtcaacaaattttataaaacactttacactattagtatgtaaactatttactcaaagataaaagttatagtatgcagtataaaatgaaagtaacattctaggttcatacctttacagtagcagttccactgtccgaaattccaattggaactaaccaactgctaacagagtacctccacttcaaactcaagtcagctgtggcacctgaaacgacaagagcaatgcctgtctctccagtattaacagatgaagaattaacttggatatcattgatagtgatgtcagaaagaaccactttggcttttccaacaagagggacttgcacagtcttctcaatttgtggcagctgagactgaacaatagaggcaacagcttgatctatcagaatatccttggcaaaatcaaggcctttatcagatatgaccacagagatgaaaccctcttcatcaccacttgtggaggatgaaaggaacagaagggatagaagaagaaaacaaattgagggtgccattcaattttgcaggtgtgagggatcaagccaatatctttaagcagaccaagttattgaatcttgagcaaaacaagttttgactagagcatggttaattcttcatgtttatccagtgaaagatgaaaacttaaacacacccatatgatgaaataccataccaagggaaacagttatacaagttttcttactattttatatgtggaataatgaattatatcgtattggattgaagctgaatttttgcaaacaacgaccaggaacagcaactgtgaatggagacgtagcaagaagtggttggttttggatttttgttaaaaaaatcattattaaattaacatggagatggcatagtagtgatcattgattaatataacgacatgtgagctcgagacccacgcgacctgtaagttttcatttttacttaaatatgtttttgattttgtaagttagtattttttttttatttttgtttcttatgagtttatttttataatttaagttttaagttgtcattttatatttttagtctttataaatttctattttcatttttaatttttataaatttacattttttaattttaatcactttaagattttaattttttatttataattcctataaattcatgcttacatgaactataaataaataacatatcttacatagatcataattaaaaaaatattaatttgcagaaactaaaatttaaaaaaaaaaaaaaagaaccaaaaataaaaaaccactaacttataacaacaaaaatatatttaaatgttctagtttttaacttttgaaaatgcattattttacaatattcccattcttgaacctacatggtttaactttactcttgtacaagtacatacaactcaactaagtaaataaaaaatgttttatatttttgccttaaattaatgttgtatccttctactctatcatcatgctactttatacggtaagtattgaataaaaactaaatacatttaatgtcttgaaaatataaaagagatttaaagcttaccgtaacaagataaaataagaggatataataaccaataattgaaaatacacatgcacctcatatagaggggcgcgaattatttatagcttaaatgtaattttggatttcttcttttattaaattcgcatttttagttttttatatttaaatataaacatttgattctctattttaaaatttttataattttgaacaaatcctcaattttgtctatattaatttcttttatttcttatattttgattaattaaattatttttgacaataccataaataaatatattaagtttatagttcaattaattgtaataaaataaacaaaacataaataaaattgaaaattttaccaaaattataaattttctaaaatagaaaattttaatatctcgattttaaaatatatgatcaaaattgcatattaaataaaatagataaaccaaaatcatattttaattttttatttatttttaaaatattactcaacttttatcacactttaataactcagacttttggctaaaaaaaatacaataactcggatttccaatcccaacgtaatctaatgaaagttaaactttcttgcatgattgaactgggataaatcatcatttagttaagttggctttcatagtcatgagcttttgcattctaggttttctcacacattcttgtctgctcaggcttcaagcattttacacttcagcaaaagctcaataaattactgctaccctttcacacaataaaaatatgtttctcttgtgtattttttaagattttttctaaattaatttaaataaaaaacaagttgtttaacttaagggaaaaataattttaaaaattaaaaatttaattaagatttgataggcaaaattaattttaaatctatcatccaccctaattaacttgaattaaaaatattgatgatgtgctcccatattctttttgtggattagtaacactaaagctcatgaaaatttataaactatggaaagaaacaattccgataaattttaatagagagaggacccttttctttgacaagtgaaccttcaaattcaaattcaaattcaggcatggcaatatttcagtaccaaccaccaggtgtaaaatttgagcaataatacatttacacgtaatagataaattgaagataacaaaattttatggcccaaactttataatcaaaactcaaccagtgggttttttccacagattatatatttggaaagttatttcccaatattccctgattccaatccaatccttcctaatcaagttttcatatatgcaaacgtcattttccctctaaaccctctgtccatcacagcttttgaatgaacaaaggtaataacaacatattgcaaatcacatacaaattcacaatactgctatgatactaaagatggttgaagcagacggatgggatgcagaactcctgcctccagaactgatttgtccttcactgattcctcccgagtcagacataatcatctccttgattcaagtctcccacaataatttgagcatgtagattatagaaacaaagaaatccacttcataaaaagtaatctggtgctggtttcttagcaggtgttcctcttgattcctacattccattaaaattaaaaaaactgaaaatcaattgacaaatttcacaattaaatttccccgagatcatatgttcgcgaagaacaaggaacaccaattgtttgcttaaacatgcaaagatagtgcaatccaaatgaaaacaaactgataagtaaacaaaatgggataaaacacattcttatagtactgaacccaaggtcacatgaaaagcacattcttaaccacatgaatcaatgaatttgacaatagagagattgaagctcgtattgctactatttgagaaaaatggtatagctcactctgcgtacgaattcataatggcaataaatatcaggtgactttgcctacaaacctgtggagcagcttcaaacacccggaactgcttattaagatttccatccaactccagaattgcagctacattgccacatctatgacaaagatgaaaatgtcttactaaaaacatagaacacaaataagaaaaatcattttaatagattagtggattaggtacctgtagcaataatttggagctgaccagacagtaactatctggttattgaacatccatttatatccttccattaccaactgatgtgcacgacatatatagtcaatgttattggagtggttaaaggaagtaacaacactgccaccaaataagtaaccagcaccgcggggactaagaccccagccatccacaatatcttcaggatctgaccataggaggtcacacatggcaccatcatgaggtacttcttgcttccgatcaatagttcgtatctaaatattaacaataaataatataaaaatattgctagtgtacaatctaaacaaaaacaaacaaattagggtaaatttcctgacctgatccagtgtagaaatggcaggagaaagaccaccatgaacactgaaaatcttgttttcaattagagcggacaagctgcagtttgccgttatcgacataggacactattagtggaagagtcaagctataccaattaaatctgtaaatgcagttaggttgtcttacaagcaacttgacacagaatgtttccatttatacctcttgtctcttaatttttggctatttctatgcacgagaaacacttgcattttaacacttttttcaacactcctgaatgttgttaaaatagagattctatctaggatcgagaagtgatgaaagatcataaaccatgtgattgtataggattaaaaaatcctaccaaaaatataaaagtatgataatgtaattaattaagacgcgtaataataccacaagacttcgataacaattcggatatttatcttgtagtaattgctttattagtaataatgcatctcgttttatatttgataatgatatcgggggaggggggaccagaaagtgtactggacttagaagccagtctcaagcccaattcactacttttataagccaaaaaattaaggacagggaagacgatcagattgaaatcagaaatgctctaacaagatgcggagaacagaaccactcaacactgaatcactagccactacaaagatcagaacagagaaacactccaacccaagtcaaaatgggttccaaacaagaacagagactgaagataagtatggttaccaaggtcgaacacaaaaagagaaaacacggaaaattctcaatttcaggtaagccaagccaaaacgagcttgaaatagagaatagatggcagagacaagttcgaatagagggagatcgcttgattggagtgtcacttgaagaaaaaggggagagattagggcaaatatataatcttttccccaccagttcataaaacctaacccacaatttcacggcacactctgcaactcgttgaggatagatcattccacaagctcgtgacctggcactgtaatcccattctcatacaattctacatctaatcaagagcacagaatagccacacaagtagatcatacgatcctacaggtaagattgacaatactgctctctttattattgaattgacattatataatacacggaatttacttaataatggaaagagtgttgagaaaagagtattaaatatttgctagcattttcagtctatacatttattagacaaggttgtcaaaataaccaatcaatggattttaaaagcaccctctcaaacttttttccctttcaaaataaacaaagacaagcgacataaagcatccttaaggagaagtagctcccaatgcaatactcaaatctggtgatctatcagatattagcaaaccttaaatagtcgaatatttcagtacaatatctccagacattgactgaaccgtattttctaaggcattcatcatagaatccatatacctgtcaagtgatggatattgaataagtaatctggagtcataaaatgttgggaaaatttttagtgtctttcccacttttcttcatcatgtttacaaaaaggatttatttcttttttctaatttagctgatagactaacctgggtgatctgacggctttcatggtttcccctaatgagtgttatccgatccggatacctcacctgattgtatgtcattaattagttacaacaatagcgaataaaatgaaagaagcatcattaagagcacaaaaagaatgagtagttcaacatctgacagaacctagtagtcaaaagtaaaaaaaataaaattatcttttgtttttcttctttagttcctttagaaaaatgataagaaaaagaattcatcaagagacaaagtagaaagaatgaggacagtgcatcctctcagaaaatagattaaagaaaacagcatagacaaaataacataagctcaaaaggaaagagtagtccttcatattataaacaaacgagtccctagagcaagcaaataaaatcatgtctgacgagattgaaaggacaaaactgctgagtaaatttcagtctattcaaatccaccaaacaacagccaaaagcaaaaatttcaaaattttattctactttttactgacaaaaccttagtaccagaccagattaataaagcatcaccaataacaaagcatccttacattactcacactatcccatagaaaaaacttgtagaatttcattccaacagtagcaaaatgtgttcccaaaaaagaaaaaaaaaattaaaaagttaacacaaagacaataaatgcagtgaccaccaagcccatggctcgaagaccaaccacatttctgtgataatcatagattaaactgactgggacgtttttttaaattgtcaaaaggcacccaaaacagatctaacatacagaaaaaaaagcataaaataaacacataaaccacagaagatgcttctaacttgcagttttataagagaagaagaataaattatcaccttaagagcgagcagaagcagaaacgtttcaaccgagtaaaaccctctatcaacaaaatcccccagaaacaagtagttagttttggggcaatcccctcctactttgaaaagctccttcatgtcataaaactgaccgtgaatatcaccacatatctacacaaagaccaagacaaccaacaaaactaatcagttgaacacaacaaaaaccagaagcaggatcataaagaagaatgaacacagcagagtagaccccaaatgcacagtaatagaaaaaaatgaaaaaaaaaaaaaaaactttttgtgtgcccccatgacactctggacacagaacaaagcacaaaacaacgttttttttacgtaaataggtcaaaataaagagacacaaaaaacaccaaatcccctcgaaagaatgacacttaagctttctctcatcactatatatgacatttataacaagccctatatagattgaagtcccaagtaaagtagttatcaactaactaatcgtattgaactaaaatccaacgaggtaattttgtttagtacgtgagctgaaatcataagtaaatcgaaacccagaaagaggaaaaagggaaaagagtgacgaacggtgacaggggcgtcgaccctctgaacgttgctctcttcgacaaggatttccatggctttgaggcaaagcgccttcacttcagactccttaagaggctcacacctcttcaactgctctatttgcctgtccaggtctgaagatgacatctctctctctctctctctgcaaccccttctcccccctctcctctcttctcttctcttctctactgcttcaatcttttccctttttgcaatcaccctctttattttctaatatatttccaaattactcacttttcatctttttttttaatagagttctgcatcagatcttatactctttttagttccctctctaccttttttgtttttatttgcatatctctcggccacaaatcaagattaatctctctacttaaaaaatatcaatttatgaccaagaattaggactagtgtctttactatatttcttaacaaatattctttcgtaaaatgaaattgaattcctaatgacgctagtcatatcgcaccatttcgataatattttctttctattacagtaaaaaaaatataactttataatatcttttttaaaataaatcataaatatttgaaataaggtaaaccaatatttataaaatttgatgtaataattaataaatgtttaggttattaaagtcattgttcgaaactgtatttctaatcaaaataattgacaataaaaaaaaaaaacttgatttctttttacacacatgcaactagaaattgaaaaagcagctgtcaataatttataaaatgcaaccaagaatcaaatgttgatagctgagtgtttggttaggcattagtaggtcttaagtacgtctaagtctgatgtttaatataaatggtgtttggtttgatagtaaaaccacaatgaacaaccattatcgtgatgagacctggaaaaaaattgaagtaatttaatgttgtttcacaatcaccataatttttatcacaattatatatgatccataccagagtcaccccagatagtagttttcatgttttttttaatgtattttgatgtgaaattaagaaaaaggcatgtaaaggaagcgcaaacaaacacactttgaaaacatgatatatcaaacaattatttgaagttttaataaaaaaaaactaagaaatgtagatatatcacaataaaattatttaatttgacaacaaattgactaaaattctcatacaaatagatttttaatcatattattattatcccttaaaatcatattattattatattactaaaagaattactttggtagtctaaaaaagttagtggacaatattaagattatacaaattattcaataatattaagaatgcagttattataatacactgaaagtgtaaaaaaattgtcattcaattacgtattattatatatgctaagtttgatcttaaaataattacgttaaaagatatattgattttttaattatagaatagtgtaaaaataaaatatattggtttttattaattatataatagtgtaaaaattatactgataatacatgacagttaaactcaaattatttttctattaatcagggaaaatattattaattgatgtggtaaaaaaatattaacatcacaactacgaagtcgtcaataataaaaaaaaaaaaaaaaacacttccgaattgtttggaattatttaaaccaaatcaataagatgagagataaagtgaattacaaaccttattacatagcctgtacttagcttgtatccatgatttgaaaaagataccaaattaattgaaatcgagtctaataaaatttgaatttcttatggatgagtaacactaaaataataagacaaagttaccaatacattgaaataaaataagctcactaaaataatagaactatatacaggtattttgtctgtcgacatgcccttctcgctgtataagcattagtataaagaaaatgacaatactatcaaatgtatatccaacctttatagcaacttttacacgagcatatataatgacacaatgattgaatttttcttttgataattgaatgaagaacataaataatgattaatagtttaagttgcagtaataaaaaaagatcataaaatatacactaaaatcttaagttctatatcattcgtacttatatattaataaaaaattgctcaagtctttattagattaaaccctcaagttgcagcttagctaaagaaccatacggaactaattaatgacttgaccatgcacatcaatgagaaaatcagaaaacacccacaagaaaaatataactactttccaagtgtgtatatagttccaaatagaaactcttcctttcttctacttagcttccatgcatacaaggtacaaaccgtagagttcaagtaacaaatacatatggggagaaaatggtgtcatctcttgggcattcagagaagaaaatagaagagacgtgagtaattaatgtgatgcaacaaaaaagacaaaagaaatataaaaaatacaaaagaaattagaaatatgtaacaattgtaatctatgtgcgtgtgtgtgtgtttgatggtaattttaagtgttgaggaaatcgtatctcaatacacacgtgtgtgtatttgatagtagtaactttaaagaaaagaaaaataagaaaatggcatgcaaagacaccagcatgtaattttgaagaacttgagaaatagcatgtcaattaaagtttacaaatattaaacgtttaacagtctataatatatatgcgacgtcaaggtttacacacagaaatttaatcacagaaataattaagactcttctgtgtggtgtgtttttttaattttggtttttaaatatgatttttaaaacaaaaatgtttggtaaaaatgaaattgatatctttactcatctttattttcaaaacaaaacaaaaaataatttgtggattttaattttaaaaaatcacacattctctacatttgataatggttattttcattgtgccgccatcatcaccatcagtgtcgttgtgtcatcgtcattactaatattattgttactatggatcaatgtcttcatcattgtcattgatatcaacatgaccaccgctactattattattatcattaatgttaccgttatcacataaaatcaatcttaaattaatattaataggatataaaactttcaaaatgaatttattttaaaatttaaattttgaggaaaaaaacctaaaaataaaacttggtcatttctttttaaaaaaattgaaactaataactaaaaatcatccaaacatgcctaagaaaatttactttgtgatgttactgtatttcttaaacatttttttttacatatttatcatatcaaatacaatattaattacttgatattttaataatgaaattgataaaaatttggctttgagcctacagttaagagagagagagagagagaatctgacaaaattatcatcttgtgaatttttttatagaaaaagtctaagccatgcacttgtttatcaaagaacatagtgattaactaaaatgtggttggtatgagtaaaatttaacttgtaccacttaagcaatgtatttaagtcttgtagataaaattgtgattgaataaagaggttctaataaaggtgataaataagatttattaatataacatagtcatcaacaaaatcaataatattttacactattatcataggaaaaaaataattaatgagtgctagtaacctattttaaaaaacatttattttaaagacaagtgatcattgaatatttgtaattgaccatttttattttttgtaagttttattcatgagattgaataatatttctttttattatgtttttttacttattggacataggtggaataatttaaagttgtgtttatgaagagaaatcttgtaaatgtgtttgaaactgagattgattgccttgtattaagatgaatttataatttgaacttcttgatgcatgtatttttgtggaattttggacctaatgttatgattaattttggtggatataaggaatcagagtactaatgttaatatgagggtgcgttctcaataatgatgaagctagaaaagcattaggttgaagattttgcgatgattgtttggagcatctggcaaggatggaatgaaaaacagtgaagataggatgtgatggaaacctcgatcgaggcagattgtggacaggcgatgatcggaagaaagtagttgaaaatcgagagcatactctggcaaaagaggaactaagagcatgatttgaaatattttttattgaaaaagatattatattttcagtagaaaaattctcaaaaacacttttaacttatatccaaactcatcgttctttgatgaacaaggaggcttcgggtatggtatgtgcccgagagacaatttcggacaactttgcctacccttagtggaatggaaaccaactaatcttcctgtccgtcaaggggactcaattgttgtgcatgcatcaacttgttgcaatatggactccttctggtgatatctttgaatttgacaagttcaattatattattaattcaaccaacaaattaaaatcataacatcttttaatacattcatacattatccaacaattgttttcttttaaatgctaaacattttattagaagacatacttgacacagatagaatgtgttcaagatcaatagatccccacccttacaaaagcctcccaagtcccaaaagtattctaccctgtaaaacctaaaaatctacaactgttctttttcttttttacatttctcttctgcgtaatactgctgctatgcatattaattaataaaaagatattaagtgagttagatgaataaataagtgaaggaatgataatgataatgataatgatgatgaataagtagttatcataattatgatcataaatttaaaatatatttaaacgtgataaattaaaattaaatattcattttctaaaacttataaattttttttttttaaatttaaatttccaaaataaataaataaaacactcaaacatgaactccagaaaaagttacatttatttttaatttttttttttatgtgttcctagttcctaagatagagaaaatgctcgcgaaaatgacaccttaaaacgacgtcgtggtgaatgaattattcgaaacctttcatcttccgcaatcccgtgaggtaaacgacggtgacgattggtgggtggcgccgtacgcctcatcccatccatcgccatcggcaccttcctaaaacgacgtcgcatccatcaccccttttctcttcctcacagtcacagcagtggtagcttcccaaaaaagagggtaatttcttatccgatcgtttcccctctttactctaattccgatcactttcggttatcaacacaattctccttctgaactgcactctgcttcttcttttctttgaattgtgcgttttgtgtatgtctgattgtgaaattagctcatgttaaagatatcagcatctcgtgatgactccatggtttattattaccctgtgcgatcatgagttttaagggttcttcatgctgttctttcatacttgaattgttgtagtaaattagtaattaccagcaattcctttttcgtactcgctgttaacagcaattctggtttaaatggagaaaagctttgttgagataagtagtttaatttgaacaagggtactggtaaatttgtgtatgggttgggttgtactaagcaaatagaatttatcttgtgataatcatgtcccataccgttttgaagatttctaggcctttctagtttatttattaccgggcaattctttagatgcttccggtgtttttctattaaaattagagtttcagcttggtaacatgtgctttatgatttctatggtaaaacttaaattatgattggaaaataacaccgaaagtacctaaacaaccgcatccaagttttttccacctgttaattgttgtgctatttcttcatttctccgatgtaaacatcatatttgtttgtttttattttttttctctcacttttttctttctttcaggtcaatggcatcttcttcagactcatgggtgaaggaatataatgaagcactgaaacttgctgatgatatcagtggcatgatttctgagcagagttcatttcctgcatctggaccagaaacccagcgtctttcatctgctataaggagaaagattacaatattggggaccaggcttgatagcttgcagtcccttttgtcaaatcttcccagcaagcagcccatgtgagtgtgtaattgttgattatgctgattgaaaaaggtcatgctgtttattaagctacgtggtttaaaatagaagaggcaatgttttcaattcagctgtgaaggtgtatgatgaagtttgcactattgttttatgaagtgtattttgctgacttgacgcagatctgagaaggagatgaatcgtcgcaaggacatgctttcaaatttgagatcaaaagttaatcagatggcttccacgttgaacatgtcaaactttgcaaatagggatagtttgtttgggccagaaagaaaaccagatgcaattaccagaacggttgacctggacaacaatggacttgttggacttcaacggcaaattatgaaaggtcagttgattggattgtttgaaaatatattgcttttaatctgttctttggatctgatagtgcattgctattcaagcagaacaagatgatggctttgagcaattggaagagactgtggcaagcacaaaacatattgcattggcagtgaatgaagagctgaatctacacactagactaattgtatgttccctttgtgcattaatttttgttcttcctgaatctttggttttgatccgagctgaatgatgttgtgtaatctatgtagccaacctcagctagtggtttgttgtttcccttctaaaactgaatcttttctttttgtctttgtctgccaggatgacttagaccaacatgtagatgtcacagattctcggcttagggtaacactcttatcgtaaacttcattggggccaaatctcttgttaagtcatatcaaggttaaattatgttaatattattgacatttacttgctgcttatcttttatgtttctgttgtgaaaacagcgggtgcagaagaacttagcggttttaaataagcgagccaagggtggttgctcctgcatgtgcatgcttttatcagtggttggtatagtggctttggttgttgtcatttggctgttggtcaaatatttgtaatgaataaaatacccaaacttggcaagagtctgcttttcatctttgtttctgccgtgtgcactaaagaatcataaccaggtttcctgatttctcttggtacttttccaatggaatggaatttgttgaggtcgtgaaaggcgatgtattgtattgtaattgccatatttaggtgttttatatatcgtgtgtttttctcttgtacaaatatgaaagtgaatgctactggctggagtatcaatgtggttgagttttcacacatttctccgtgagattgtgctcaagtattatgtacgtgatttgcattaatatcgtgcaactttaatgtgcaaccacaacgaggtacttaagttaaatttcttaaatcccatcataacatttcattttttccctttctttttacacaatttaagcaattttttctttgatgatgtaatttcgaaaaattcaataaataaatcctacaggttactctactcctttaatcttattatttaacttgaattttttgttttgtttttaatattttttttccagctattcaaaactttatttgtaatggtttctagattatccttctcaaatgcattgatcattcaaagaatcattgataattcaaagaatcaatataacgtttttcttataaaaataataactttatcactttatccttagatgacatttaaatgcattctattgtcagatcttcacacattaactataagaattcctcaatgcttgatcatgatgtaatatcacttaattataaccttccctcgtttttttccatgggaagaagggaaatcctaaggtaagagggaacaagaggatattcatattcaattcaatttataattcattgttatcttaatctagcaaaaacgattcaaggatatattttgtttttattttcctttcatttgtaattacaaaaatgtcattataatttctttgtttcatgttttaaataagaaaaaagggttatatagtgacggggtaaaaaattttatacaatcattcaatcacaatctatcatatatgataaatttgttaatttttaaaataattattttaaagtaatttaaacggtgattcggtgcatagatattaaactctttaaagaatgtctagaaaatggtaaaaaagttttttattacaacttgttatgcaaatctgataggagtaggaggtggggcaaaatgtataacaggagggtcaattagtaaaatacatttagttagttagttatactaaatgtgggagggtcacaaatagataaataggaggtgagtgattgaagaaagggaatccagaaagtattaggagagtggtgaacctcgaattcactattgtattgcagtatatattctccaatattcaaataaagattcattctttcttcttttaaatctagttcagttcctatcactcttgaataaacaaaataaaatgaaaataaggtaattattttgtacttaaaagtgaaaataaaatcacaacatattctcaaactaacgcttttaaatttgaaaagaagaaagaacatcaagagaatgatatcccactaaattaagcatcaagatcattgtactacagaatgactacaatataataattggaaaaatgaaaagggtaaaagaaccatgaaactaaaaaaagagcttccgtggggatggtctagattcaaccttgtttgaggacttgggggaggagggactgccctgctttcttggccctcagccactttgtcaagcagctttgcagcccttggatctgttagcaacttcttctgaaaagactgtgagaagccagttgcaatgatagtcacgtgaatctccccagtgtagcgatcatcaacaacagccccaaatataatattagcagaaggatcagccaaactagtcaccacctataaaaattacacgtgttaaggacaaggcaaatacgaagaaaaggtaggagtgaacccggtacgtataccaccatacagcaaaaggcggaatacagcacaaactgaaaagaaaaacagacccctgagggaaatattgatattttccttttttttctcttccagtgaaaggttgggtagctatccgaaattcttgactagatgaattccagaggaataaataacttttttaacatgttaaggtaaaatgaatgcaaaaatataaccataacaaaaaactgcagcactatacttgaaatcataaacacaaaatcaagaaacattataaggttagtttgcaacaaattcacaagatcaaaggaataacaaaatgtttcttaagcaagtggtgacaatctttaaatacctgagaaaccctgttcacttcctgcagggttatgtcctttcctccagtaatattatacactaccccagtagctgactgaatagatgatccaattaaaggagccaaagtagcctgttctgctgcttcttctgctcggtttttacctgatgaaacacctactccaagcattgcagtcccagagtctttcatcacagcttttacatcagcaaaatccacattgacaagtccaggtacctgcaagaaggcacaccagtttataatgtccagaaaaaaaatgcatggacatacccagacataaatgcaaagccacaatgcccaattatgaaggagaagtgagccagtgaccactcaaaagcactaaggaacaagtagggggagaatagttcaagctttttatgtttcccttttctcctcgcaagtagctgatcttatgggatcagcaaggaacttaaatcatgttctagtgtctgaataaaaaaatatgaatacatagtttgccaatcaactcactgttataatgtctgatattccctgtactccttgccgtagaacatcatcagcaagacggaaagcgtcctgaagaggcatctgctcatcagctatatcaagcagacggtcatttggaatcactataagtgtgtcaacatttttctgcagcctttcgatggcttcaaaggcctgaagaaaaccaaatgcaaactagagacttattttctagatttcaaacgacaaaatacaagtttcagatgaaccatagactcttatctgctagataaaataaatttcagacaacaaattatatatactggatgacacataacttggataacaaactatatggtgtgtttggaaaatccattcatttcaacacaatgtcaaaagatgaatttccaaacacacttttaaccagaataaaataaactgcaaaggaagaagataagtgatatttttcaacatattaaaaaaagaaggtagtattaaattaagagcaaaactaattcagtagtcacattcccaaataacgagaaaaaggacacctgcctgcaatgatctcttacgcccttcaaaactgaagggataggtaacaacacctacagtcaagtagcctgcctcttttgatatttgggctacaactggggcagcaccagacccggttcccccacccatcccagccgttataaataccaaatctgatcctttaagagcatcagcaatagcatctctggattcctccgcagcttgttcccccaaaagtggattcccacccgtacctgcttgtctatcaggtaatttgaatcaaaggccacccccctcaatttgtcaacaaattcagcaaagaaacaagactgtagccacaaaaacaaatcacatcatagtaaaaactatgcaagtagagtgcctgacctaatccacgagtcagaacttctccaattttaatagggttctcagcagcagaatttaatagtgcctgagcatcagtatttatcgcatagaagtctacaccctgattgaaaagaaaatgccgcagaattcaacaataacatctgcattattcacttggtggcagcaaaacacaaaggcgaaaaactagatgcatttatttaggtgcttttgtgttgttctccaatcagaattggagtttcaccttggcaacctatgccgacatcgaatataagcatttattatgcaaacgatcgaggtgaaactctaattctaactggacaaaatctcctaaataattacatctaagttttgtccaaacacaaatggtatcttagagaataacgccgctggctaaaaattaacattggattaaataagtgaatctaaaatgtgcaatcaagataaaaaagaagaagagtaaatagaactgtcattctaatttctaataactattttactacaacaataactattttaaagtggtataacctccaaacacaagaagtaaagcattggagtcactacaaatagaaagcattgaaaaaaaatgatattgataataaccaattatcgatgttccaaattgggtggcaaagacaatacccaattgacccacctgcaaaccacttccgatcatccgattaacggcattgttgccgccaccaccgatgccgacaaccttaattttggcgttatccacgtaagcgtaggagcatctcaccgacccgaaacgacgacttaggcattgaggagcaatttttgttgttctggagttgaaggaaacggaagttgtgagtgcattgtggtggaatatagaagagcatgagagtgagagaagctcgtttgggttgcggtttgtgaggggatgaagcatagccatttttattttttgttctctctcactcacggtcttttttttttttttttttttttaaaattagggttttagggcaaaatgaaaatggaaagaaattgaagctgattaccctccaattttgagtggattttgtttacttggttggattcgaatcacatgaagggacgttgtttattaacagttcatcgttacggaaagcgacgacgtcgtttttcactccactcttgtctcttgctcgttggctcgcatgttacaataaagaagaaagaaagtaaagagtattaatcattaataataataaaattctagtaaaaaaagcattaataaaaaaaatttaaataaatctataatctataatcactaataaatcagttattaacatactatatcaatttaattgctgtaaaagaaacacagacatacacactaccaatttaattgatgttatgacgtgtcttgaaatattttttctataaattttcttttatttaaatgttttaaaatgatggtatttttatattttattttaaaattttagtcaaatttaaagtatttgaagaaattattgaaaacttattagtatataaaatttgaatccaattgtttatattaaaaatttctattaatctattttctcttaatgcgtcaattaacgttcttggtatcatacatatcatttttttcgtcaaatgctattgtaacatcttaactagtgtaataaatcgggctgagtattattttttgatatatagtttttttaataaaaaaaatcaaactacgcagagtcttatttgagattcaatgcacttaaagttttcattttataaaaaaattctgtattttaatatataagagtaaattgagatttaaaatcaaagaatctaaggattcatgaattgtaaattcttaatacatgtcaatctttttaataataaaaaaaattaaaacctaaaaacttaagttagatgttttttgattcatgcagataaaaaaactttcttccaattttttgtaggagtaaaaactatttttttgaaacattagattttattcttgaaaatttggaatagtaagttaaagatttatttgtatctagaagtttaaatcaagaaatttaaatttttaactggaaaatgttttggtttagaccttcatgtgcaatttcaattcttccttcttggaaagcaccaccttaggcaacattgtagtatgagagtgttatacttttttttgggtacatacaagagtgagtatgaatatgatcgatgtacttcatttgcctcgcgtttgcaatatttgttaagaaaaggagaatatatttaatagtaaatggtagagtgttaatagcaaaagctgataaacgtggcccaagaaacccaaataacaggataggagggaataagatgggcccatatgcgtgcaggtataatgaatcatgttcaatcaatcagtggccatgcgaggtgataaaattcaaatcaaaccaaattgttaagaagcttcagatcactaatacgacgacgcattaccggaactaaggggtaatgtaaaaatatgtaatgttgtgttgtgttgtgtcgtttcgttttcactttcacgttctcaaattttgtttgtgtctcacaggaattaggatccgttatggggttctctgtaaccacgctaattttcgcagtgattggaatcgtggcgtccctttgtaccagaatttgtttcaatagaggaccttcagctaatctgtatgctatgcttgcttcttcatttctttctgggacttatgaactaatttaataattgctgttgctaatcttacacagattacaaataacaaattcataatctcgcataactcatagatctggaaaaatttgttattgaaggaattgtgatattgccaaacatctttgtggatatgctgctctatttaattaatagctgattctgttatgtcgccttgatgagttttacaatgtgatgtgattgatgtatttatgtttatattttagtttgtgtcaaagtttttttgtattcttgaataatgacttccttgaattttgttgtgtctcatccatctctttccatgataatgtttcctctcacaaaattattgttctctgtatgaactaatatcttattactttgttgcagatttcacctaactttggttcttactgctacaacatgctgctggatgatgtaagtacacctttgatttgcaagttcttttaattttcatggagttagaatagggaattgctgcactgtacaagttttgttcctgagcttgttgccccagcaagctgttattcaattaattggaaaaggaatacactaaaatcaaagttttcattttatttcctaaatgaataacttctccggctgaatgtgtccataatcagttctgctgaagctgtttgtgtacctgtccttttactctccatgaccatgatactgccacatgaatttggagtaccttttagttgaattattatgtgtcctgtgtaacagtaccaaacaaaagtaattgaagaggaatagatgaacttttcaaaatcagaatctgtttaggcaatcatgcctgggcatacccatgcctttggtgctttactttggtcctaagatgggactgttcaccaccatatttcacaaggagaccaaaggatatatgatgggaagctttggcttgtgcttgatgcttaaattgactgtaatataattgtagtgatgttaagtggaaatgcatcaaaacttgtgagtagtttctgaatcaagaagtcaaatgcttgaaaagttatcatttctctgatataactacttatttgctgtctgacagtatgtccagcataattaagggaggagggaaaatgaccttttgatggaatgagcacatgctttgctgaattacattatttttattttatttttttggaaaagggggaataccaaaatcttttatagtctttatcaattaagttcattttatttctcctggtgatgtaattttcatagttctaaacatgcctgccttgagttgacaaactttggttcattaatttgtgattacattttcctttggttcaatagtaattctaactggtaaatagccatgtcctgttttattttccattaagctttctttctctttttgcttacttttgttcttcatttgctatatcaggtgggcgattgtatatctagcacagatgaaaccgctcatagtacctatcttgagtgagggtgaataactttctgtataaacagatgcaactcttaagaatgtgaatcactagttagacgctggagaggagataatttcagctctcataaataattcagtattttctctggctggatctgtatgtattcttgttggataatgacgtttcaattggatcatcttccattgcgggcattatcccatgttgttacaattgttgtattcaacccttgttcgttccataagtattttgatgaaataagttgatacaagaaaattatatctcggttttactatattataaaaaaaaaattgatgagaggattttttcatgcaatcatggtcattaccaattataagaaacgtgatgaattatgtgacgtcacatggattttttatttatttccggttataatgttttccataagagccaacatacatacagatggtaaaaaaaaatgaaaaaagaagccttttatttagtaaactgtaaccgaaattagcacgaggtgaataggttttcttttgcaattgattaatgcttgcatcgaatgtgaatcctctcctattgttaagtagcaagatacggtcatgttgaagagaaaaatacactttacaaatatttcacaattatcgttaccctttataaattatatagcaaattacaagtgattcacatactgattgttgaatcacaaaagctcataacaatagtaaaataggagaaataataaggtcaataaaaatggaataaatatagtatatataaagaatggatctggtgtggtcaagtttatagtttaagtattaaactagccaacaatttaattactttatcaaatattttactttagaagatctgcactctatgttaatatataactttccttatcattaaaatgccaacaaatctagaaaaaatatatttattatactaaaaatgaaaaatatctaatatatcagtattatattaaacattctttaatcaatatctgaaatttcaagcaattaataattaaatctcgaatccaaaataaactactatcacggatagtctataggattatggtaaaatttcagatattagtatcagtatttctaatatagaaatcgaaatgaagaaaatgtgtgtggtgtattttgatataggaataggacatcaacatttgaggagatataagattggttgagtggtaaaaggaaaaaaagataaggaagggaaagaagaagaggttgtgggttgaaatctctccactaacaaaaaaattaacatttaacaattaatattggtcgaccaaaaaataaataaataaataaaaaggaaattatgataatattaaactactaaataattcctctaacttaaaagtttaaccatttgtcagttttcctgcacgtcacgagattaaaaagaaatcacataggtaagacagaaattaataaactaagaacaaaagaatgcagtgactatatttcacttgtttttctatatagataaatattcatacataaaacaaaattagtaagtgcaaaacgtgcaagaagagcaacaatcgtttacttgtcgaaaaataaaattaaaaaagaaactgtaaacaaataatatacgtctttttcaaataatacggggtataatatgatgcgtatagtatgatgcaccgtgatgcgctctgattaatgcgcgagacaatgaaattggaaaagtaaaattgagaataatagaagtgtttaatgtttatataagaataatattaaacagttttacactatcttataagttaaggtttttacggattcgtcaatccgtatgaattacgtagattcatatgagagaaaatgccaaagataattttggtattccactgttatgaaatagtgtattagaaatttaaatgatgtaaaaagcagatcccagaaagttgccatgactgcggacaccgaggcccactgggggcccaacacggtatcggacatcaataatgatttcacgggattgtatacggtgtgacgcagggtatatgttacaatgaggttccaccttctccccaagaaatcacgcaaagaaattgacaaataagggtcatctgacggcaattgaagctcaatcccaaatgcaagcattgaccacaatgttgcatagtcccaaaacaacatccattaaaagatacatgagggtgcaatatatgcccaaaataattgtagggtgaagtttttgtttgtagtggtctttaaggcctatgagtgagagaccaaaaagcaaggccttgattggaaaaataatgaaatgaaattttaattttgattttgatgggttttgtttttggggtgagtctatttgggaggcatgcaaaggagagaaagtgaagaggaggagtttggagttggtgagccaagtgatgaagaaggcagtgacacctgttgggaggacagtggtgggttgaaggggtaggatggtgaataggtacaaccagtggcggacccaggattttgagcatgggagacccaattcaaattgatagacaaagaaatgcatgtcaaactaatattatatataatattagatgttttaatttttttaatctcaaaacaattaatattttagcatttcaaagttcaattaatattatttttccaaatatattcttatgtaatatctcaccattaatgatccagacattaagaatcacagcattaaataaggatataatttttaaactatatgcattaaccttacgttaatggagactaactttgctaatattgacatgagtcaagagtaatttttaagtaaaacgggataaccttgtaattaccactaactttaggggaggagatgacgtaaatagttgtcattaattgttctactataatttcaaagtaggacaaatgttaggagacatgagattccttttatttcttagaagtttttgtccaacagagagaagctttttgaaataagtctggcaatttcagcttagaaaaggaaaataagggagggaataaatgaggaagggaactacgagggaaaaatcaacggaaaaaccttaagccaagtcttattggttcaatcgatgagataatcaagtactaattcatgggggcccaatcctgcttttttttttttccggggggccctaggccccaccaggcccccttctcggtccgcctctgggtacaacactggggagagggacaaaaacctcatgcctttgggcacccttcatgatatgaaataacagtaacatagggaagctaggattcaaacccataccttcatttctccttccatttccatacattttgatacttctattattcttctttgttcttgatccccttctcgcctgaattcttaatatcccaatgattttggtggcacttgtggaatggaacagctttattaattgttatcgaccaataaccattcggaccatcgcgcatagtacagatttctattcttaaatctgctggtcaagatttttttttctccttctttttagtgtgcacatgctgacgggtagaaaatttaaattatttactaaacattatgaaacgtaaaaaaatagaattaaaactcttttatataaaatagaaaatttatattcttaatatcacaatgttcatatgctatgacatgttcatatgcttagaggactcgaataagcaccatgacctagacatggacatcttgttcgtgcgatcagagaaataagtaatttctttttaatgaataaatatataaaatctgtttggatataagttagaagtatttttaagaatttttttattgaaaatataatacttttttagtaaaaaatctctcaaaaatacttctatcggtatccaaatatgctcatagtaatgaatgttttacttttctctttctgcgtcaaagaaagtagtatagcagttgagaactaagttttgtatgaacagatcctgtccactcattttgatcaacaatgtatatttcttcaattgacactctccagattttttcaacgtgagaggacccgtgtccaatttttttcgaaaatacgtaaccattaaactctaagatatatatccatacacacatacaggtaagataacataatataatgtatatttagtaggttcttttgttaatctgttttcaatttttgttatttgtgaaaatagattagaatttttaacccaatttattgaaatgaatttacatatttcatcttttttctaatcagtaattatcactagctgaccataatctctatcacttttccatcataatttttattatcatcattatcattactatcactcttattataactattatcattatttcgtcattataaccattattatagattgatatcaccacactgatatcattattattaacattgttataaattgatatcatcaataatatcattatcatcactactactattatctatttaacttttatcacataaggacaagatagtacaataatgttatctaatgtactaaaaaatgttaaattaaaacttatatttctcttatcatcacttttatatccatcttatcctaaaatatttctattacaatccaaacacaaaaatcatgaaagactatttatatgataattaccaataaatcccaaaagaaaaagaaaaacatattcacaggtgttctttgacagattgagtgggataagtcaaaacattggtagattaaaaacctaacctataccgcaaaaaaataaaaaatcaacaaatccacctcgtttaacgaatctatcgacagaaaaaatatgtcaaggctttgagacattcacacagcatttaatctttttcccatgcttttatcagcttaaaccttataattccgtgtaagaatgaatgagaactaattataaattttctgtttatttgacacggtaaatggtcaccattgttggccatcataacgtaatgaatgacaaaatacaaatacagtagtggaacctacttaaaggcaatataagggacaagtgtgaattgatcacattcaattttattcattcttatccctctgaataagcatttctctccaaagaacaaagatatttttgtacagactattcacatatactattctaaaggtatgttttcatccccaacttttttgaaggttgagaccattgtgaaggtgtttcttaagctttgcaagttcattactcgttatattctccctttaacaaaaacatttaacactcatctcatgccaactagatgactcataacagctcatctcccacagaaacgctgtcagactcgggttgtgaagaagtggctgtggtgtcagaggtggcatcgtcaacactcaagttggagaattcgccaccaatggcagaactttcatcttcaccacataccgaaggtgccagggatgcttcgggcgtggtggtagtagcagtgccgccaggtgaaggaaatgaatccatgtcttcagtctgttgttgcaggctccaatacattatactggctgcaagagtgagaatcatcttctgattaacctgccatgatatcaacaaagaatcaatcacatcataaacaaactgaacccagaatgtgtcaacttaattttttggtatcattgccaaattacatgatggccttgtttgaatgaagttctgcataaacacttgtagaagaagaaaataagataaaatgaattaaatttcacccataagtttaaatcaatttatacacttagcttttggagaacttaaataactttttataaaagctgaagtgtaaagtttgattttaattacgggagaaatttaaattattttaccttgcttgtttctcttataagaacttatgaagtttattcaaagaagactaatgtgtataaatttttgtagcaaatatgaatgaaactctcaggtggcaagaggcaacatacctccataatatcctcaggtaacaaaaatatggaacaaccgagcttccgtgcaacactgattatataagtggcattcaacctcttctcatcatctacaattacaacaaattaagccaatttaggagggatgaaaaaaagtagcaagtaattacatgttatacaaaggatctgtttaatatccctataaagaatcataccgctttcacccttggtgacaaggttccaattgacaatcctaggctcaacagcactcagaagctcaaggaaaaagagtccacttgacaagctcttatcctgtgcaaaaaatttgatacaaaaatttgtcacggataaatcattattttatagtttacagttgttgggaattgttaacagcaaataaaacagagaatttcttttggaaaaaaccttgaagctctctatgtgggaagttctgccaatgctcttcacttttctgttcacccatttcagaatatcagcatcagtgatctcctttccttgggaatgagatctcaaatttttcaacagttgaagcattgtgaatcgcatgagctgccacaataaagctggaaaaaaatattttagataaaattgaaagccaaaacaaataggtgggaaagcggtcataaaaaatttataaaaaataagagtaaattatatccatatgaagagattaccaagaatgagcttcttatttccttgcacaatgtcattaccagctacattgactagtgagaatctcagttgtttaccaatttttatgacctgattgcagttctctacttttctgaatggcattctaattggaggtcttgttgcatgtttccagttaactgatcctggaaatatcttgtctaacacttctaaaagtatccatctacatgcataaagtaaaaggaatcaagcacataagaacttagtgaattaacaaattaaattttgataacacattcatttaatttttcccaatcagtggataaacacgtgccatgtggatcatttggtatgttttgagatccagaaaattaaaaatttacacttctacagatatacaaggatttagattttgccaaaaataataaatgcagtttaagaaaaggaacacatacccattcttgacatcctcaaacagattatttacatgtgtagaaattccaagactattgatccacagtcggaagcatctctcttctctagatgtttgcacatcatctgtcatcatctcagcataggacatctttttagtgtctgtagatagaccactcctgcaatgtgtagggcactaattaaataactacagcacttaaacagattcagaaattaacatgcataagaatatttatttaaattatcaaatagtctgcataaaattaactatgcaattcattttatacctatgatgaaacaattgtgcaacaaatgcaagattcaaatttgaagtaccctctgcaacatcgcttggggtcaggtatcttttgcagcccattctctctgcgtgatcaagaaccagatttgccctttcattggcatccttggtatccaaggtggccggactgcaatgttcaggagcaaggacattaagcagataagcataggcctctccatcctgtaaataaatgggtgtgaacacattaggataatggtttgttaatagcttgattcaatttcaaattgtagaggcaaaactatcatgagttatgacactattggcttagaagttgggagttgaagaaattgcaattctgcaggaacaaacatatgaaaaattggaattggattttttgccgagtgaacaacctcttaaaacatattaagcaatatgacatggtcaaaggtcacatttccattctatgtcatgcattacacacttagatactcccattccatgaagtgggatagacgggattgttattcaagtatatatgtactaaaagcatctagctgtcaaagtgtggtgtgcatgtgcgtgtgtgtatatgtatggacatgaatatatttatggtcatgttgcccatttaccccataagaataatatatgtgacagttaccttttaagaatacattaacaatttgttacaaaaaatatatgtattatacaaggtacaaacaaccattatttgttgtgagcagagaagccttagcaggttcagttcaaggttaataagtaaaaaatccaaaatttgcaatgcagattttttaaggggaggagaacagcagtaattaatattttcaagaccacattttaacatccatactttgaatagtatgagattatgaaggacaagtaggactgggagacacccaagttccaacagggaactgaatatttgtaaaagccctttgaacatcaaaaatctgctaaaagtaccctgattgttttaaatataggggcccaatgatactcatttatgcaatgtttgcaccttatataatagatatattttttacttatcaatactcattgtacaaatttatacctatactcatataccttaacatcagaagaaaaatttctgacagttttctcgtaacccgctctctggagatgaaaattcatccattttagtagaaccttttcaggagacaaattaagaagctcttcgatctcctaagacaacaatgaaatgcaaaatacatcagttatcctgaaacacaatgtgcaaagaatgaaacatcaaaatttgatttaattggaaataaaaattaaagaaaaaaaatgcgtatcttattacctcgttgtcatcaaccaattccacaagctgaggtgtcttcttaaggttgagatcagccagcagctgaatctgaaattaccaagagattgagaggaaaagagaacaatgactatgtaatcatttctgaagtcaaaagatatattaggccattaagaaaaatgatgtaaacatataagcaaaatcaaccactaaactaacaataaacgaatgatatgtgcagttcaaatatttacctttatgatttgggaaatcaaccctagaacaagatgaggctgcaacataaacacccaaacaataatgtcacaaagaataaaaattaagaacctaagtaaatgtctatagaggaataggggaagtgcgtattgctaaaactcactcttccttcaactaagtcctgtgcgccaatgttaaccactgtgcagccaatagccttggcggaattgaggcatagagtatggttctcgtttacctcccaaagactaggattccgtttgcaattgatggctcgctcatctattgtcccaggcacagcaacattgataagtttactgcattaaacacgacatatatcaaagccaatatacattaaaggctcatacagacataagtaaaatgcaacaatcagcagaccctgcttatataccacagaagaacgccatcttttgcaagatcaaatatatcatttgtagctgggtccaaaggaagatattccttcaaaaatggatcatcaccaaggtagctgtttatgtgggcaacatagcaagccttttctgattcaccgatcgtgtgaagaagggtggtcacggtttccttgaggaacgacgaggagtgcctcctaccaccttgttttgtagtagcttggctttgcaaattcaaatatgcctgcatgaaaaatgtaataaattgtaaggctacataacattatatttaatgttgttatatggcgcataaactgtttcattaatacaactaacttacacataatatcccattattataagttcacaacatggaaaaaagttacctaatgtagtaatattaaaaaaagaaaaagtcaaaaacaccaaattactaacctttaagaaagcttcgaaatcaatgtcattggtaaaatcagtgcctgattcacccaagatccccctaatctcatcctcaccgtacatgtctctgaatgcatttagcttcaccattaaaggcggcaaatctccaaatgtaactttacctttctgattctttaaagagacaaactacaacaacagaaagaagggtccaataaggttaaaaataaataaataaataaataaataaaaaaaaaacacaaagcatgaaagacaacaaatttaaaagagtaatgaaattggactaaaatgtcgattacaaggaagcaatgaaatgaacctactttggatttcaggctgcgaagctcaacctgcgtgaactggctttgaagccattgatcggagacaataacaccctcaaattttgacatcttggagaatcactaaccaaagctacaaattgtatggtatcccccaaactacaaaaattccccagaaaagcttaagaatatttgtaacacaaaacaatgcgttatgcgtacgactcaacaacctattgccagatgcaattctacacggtctaattcaaatataaggccaaatctacaacaaatcccaaacaagaagtggtttagctcccggagtcaccaacctgtccaacgttatcctgacagacaacacaaacaaaagataagcttaaaaaggaaaagaaaaaaaaaacagaacaacgatataagacacaaaagattaaaataaaatgaaataagagagttcgttggattagttattaaaaaaaaaaaaaaaaccatcataaaaacaatgaccagaagctcaattccatcaaacacagaaaaagggtatgacgcatttcacatctatccaatggtttttcaacgaaagtatagcaagtctcatgggtattgagttatttacccctccccccgcagagcaaaatccagttgggaagattgagatcgaggaagaagggaagaaagataagaacttgagtgagaaccacgcagaagcagatacaacattgtagtaattgtatgcatttgttgaagttaatgagtgaatgaaaataataatgagaacatacccacacataaaaatgagggtatgggttgtttgaatgctcaactaccccttcattattatttcactaacaccacaattgaattgaatgaagagaagagatgcgcaaggaagagaagaaaggatcgatttttcttagtgggtaggcaaagtgacagagaagagaaccgaccgtgtgactcccaagtcctatgctatgagtctatgactgtcttgtttttatttttattttttgttgttgttggtttggtttcagattgcgcgcgtgggttaaccgcgagagtatcttgaactcgctctacgcttcgcacacgtcgttctctgggtgtatagtttttttggtgttttgtggaaccgactttgtgatctcagcaaaaaacaagcgtcgttatggcgggcatgttcatcatcacagctgggattcggtttgtgacaaagtgaacaatgcattacgcaacattatattattacatttttttttgtcaaggttcttgctatatttatattccataagatctcgtgtccaattttttattcaagcaaattactaccttttcaatttatagcatggtcaattttatcgtaattctgttatatttttataaaaaaggtcaaagaatgaatagtggattcactgttgtcctaaaaaaattgaatgcaataacttttataataattattttaaaaattaaattaacaataattctaaatgactgataggtaccgaatttttacttataatacataaaaattaaaccttaagaatattaaatatcatttgtttttcttatcagaaatcttttgttaactttgctgaaaacaataaaaagatgaaggatgcttgttttaaagttacatataattgattttaaattattaaatagtttaaatatagtttttaattaatatcttatacagtttattgtattaaaataaaacacatgttataattataagacttgattttgatcactattatccaaacatatgtaacttatttctaatacttgactatttatctatttaccatatataaatttagagttgcaaaatataatattacatgtttatataatttttttacatcacatgttttgctacgtgtcattcttttctacaattcttccaataactctcatttaacatcaaaggtttctataattggtgccattacactcttgttcattgaaattgtcactaaaaccaaagtactctgggtcgagctgcttaaatggcgtgacactcatttttgcaatttgtatgttattgtcattacaatttatgacattaattaaaacttttgtagctctcttctccgcaattagtgtattattgtcattatacatccatgaattgaactcaatatttggataaagaacaataagaagttacagtctccaaactcattctttcctgcatgaatttcgtctactagcttcattcctttattttgagtttcagagaaaacaacataataatggagaagaaaaggaagataagcagaacaacgagaaaggacatgattgttgacaccaccaacatgcccgtgatatttgtcaccgttggaattgcagtattcgcgaagctcctcgtgatggtacagcactactcattatcatgtattcgataaagtgaacaagtgactaatgaatgtaacgggtggaagtatgatgaatcaagatcccaatagctgttggagcctaagttaaagaatgctcttgctgatcaagacaaggagtctgtttggatacaagactataagtatttttaagaatttctttactagaaaaactcttaaaaacacttgtgacttggatctaaacaaatccaagtaatatgatccccatcagcaatatttctctcaatttccaagacaactattacaggaatgcattgtagaagaacaaggatggatatgctactgaattacatacggcatgtgcaaggtagtgtttttagcacaaacaatttaacattgtttaaaatctcaatgttttcacgagttgtcaacattgtgagggaaataacagattgttgagaaaaatattataaatcctttatacaggttgcctcatacttttggattggagcataggtcttaaatcaacaaagcatcaaatttcaaagaaataaaaatgtacttcagcaaataccacctttatggcaacttggtcacctcttccttctgccaaccctctctctcctatctgcaggctggggcatgaactcttattagttatagtattaaagcatccatgaacacttaatagggttgttttttgtggggttttagtataatgcaaacagtatatcgtgataagaatacatcatcttcctttgtgcaatttgtcaaaaacaagctaatgagtagcttatgaaaaggtcaaacttgaaaacattaagcctgttggcacttggtaaactgccaaatgttttctttatcctttgccactgaacactgccaaatgttggaatatctccacagcagattgctgcacatccctaacagtatattttcattgaacttattgcaggaagacaaggttcatttgggcacaccttagcccaatgtctcaattagaagctcatgaaaggagcaaatttgagaattaagcaagctcaacacctggttaaggagagtatggcacagtctagtcaatctgccttgcctctatagatttttccattacaattaagaacctcttagtcttcaattgctgtctggtgtttcattttaacacttaagaagcttccaagttttaagacagcatctgatgtccctcaaataaaggtgcagttcattttaatcaacgtgttttgcccaaaagtttgcaagtagacgtgtggtgtattagtgcctgatgttgtagatgttgcaaaggtgtttaatgtacaagaatacaaaatctcattactcttttccctccatgtctacaaaatatccagacgtctattattcctttcctctgaaacttgaaatatgtttatataaaatgtttggttcttggttctgagaagaaactcaataaacgaaacaccataataatagtaataaataatatttaaaaaatatagatagtaatgcatccttcacaacatttccgcatcagtatgagatgagtagaagtaatgtgagtttttctaagacactcaaacccaattgatgatctagcttcattaaacaaagacaacaagctatacgtgggatgaaaacatccgaagtaaatatgttcttaaccatgtcataatggcaggtttagatttcaagtttcaaacaagagttcaagagaattccatcatagtatcaaacattaaaggccccaaaagaacaaaaaagaatcaatagcaaggcaacaagtaactcgggagtcacattagagagatttagcagtttctgctctagctggggtcaagtgattagcagggataagataaagatctttttttctccaagtatggagaattagatatcagattagcactaaattcagttttggtaggatggataacttagggaaaatatttgggagttcttatacatcaatgacagagtggctagagactccttcaaagggattctggacaaagctacatcaaagcttagaatatgtggaaatccaaagttctcattggcaggtagattggttttaataaaatgtgttctcagatcttccaagttccaacctctgttatgcagtccaaccgtccatcgaacttttctttcgtcaaaacacttatctgccttctattgttagatcacagagaatttttatggagatctttaataatccttttgtgctaatggttttgttaatgtaaaactagaaaatcaattagttaaggtgagtacatagataatgtacttggctgaaaaacaacactagaagcaagtatagaaaactaaatagactatattagaagatgaagatgcgaaatgaaatacttgaacaaaatgagacaattccataatgttaagacacaaatattctagcaatgaccggtacatataaacagttttaaaagtatacaacaaccgctagtaatatataaccaatatcgacaattatatgtattaaataaaacaaaattgcaagatcgaaggcaaacaaattataccaaatgaaaaatatgacattcatattacaaaaatttgaatcagatctcccctgcaatgcaatgtgataagctttttgcccttaagttttttgttttcgaagaaggcagaaatggaattgaacaggaaagtgaggaacaagacaaattccagccatgccagatatccactaattcattctgctacaatttcatgagttctcatccttgtcttctttttcacctttttattaagttgacctctaaccattcttacaagccattgaggctttcctattaataacacacaacatcccatgcccactccaaataccattccacatccatatcctatagccactggtttccaaccaaatccaaatttctcttctctccacaaggtcggtgaagatggagaatgttgttcacggtcattgttgcatttcattgacaattggactccacataaccccaaatttccctcataagaatcattcaaaaaagtattgaactgttttccatgaggtatttctcctacaagatggttatgggaaagattgagtacttcaagaaagttcaaatcggttaattctgtaggaatcctaccagtgagaatatttgaggagagatccaatgattccaagtttgtcaaatttcccagggattggggaataggactgcatagtctgttatgggaaaggttgagccctctgagtgcatgaagctctccaataacattcggaatttctccttcaaatttgtttcctgataaatcaatgcttacaaagtttgttggaattttgttgagtgtcatactaatggctttcattgttacagtcacagaatcagtgtatgttccattcattatagatgtttccatgtattcctgcaaaccgttacccactttatcttggacgacattcttcatggcttcaaaattttgtatgtaggattttggtattgggccaatgaagttgttggatgagatatcaaaaataactaaacttcgaaatggatgcttggtctttaactgggaatgggaccgtgcaacttattggcttgcaaaaccaatacttccaaatatggtagagtttgaagccaagggggaaatgtatcctcaatttgattgttgccaagatttaaaaatccacttctgtgcaattggacaaagattttggcaaaagaccttcaaaattggttgccattgagattcaaagtaccgagcaaacttttcttcgaaaaggtactaggtaaagtgccataaaatttgttcatctgtaaatctaatacttgaagggatgataagtttgaaaggcattggggaatgatgcctgtcaatttgttgtgggacaagctgagactctgaagtaaacttgcattgcaaattggcgaagagatgccaccagtgtttgagttgaaactaatatcaaggtaatagagttggtagttccttgagaattggtccattggtgttgtcaacaggttttgagagaggtccaaataatagaatgaaatcatttcatgtaatcaattgggcactcttccactaagtttgttaatggacatatcaagaaatccccaaattggaacttttaccggccgataattttggaaattcagataaacctataaaagataggtccaaactagttaagcaggagaaactgtaattgacattggatttgaaatttagtgataattgatcattgtgcgaaagggaaaatttttccaaattatgaagcttggagaagagtggaaagtggacagatccactgaagttgtttgatgatagacacaagtgagtaaggtttacaaggctgaacatggattttggaatattgccccgtagcttgttgttgcacaaatttagagactcgagtaacaaatgcctacacagaaacaaccaccccatccatcacattgactccattctaacttacttcaaaggaaaatttatttgaaagggtaagcaaccaaagatgaatatttatagccagattaaaaacacaagatgcaagagcccatccctcacgcaaacaaacattattcatttttctaatcctttcactgcgctaatatttttccattttctactctataatgtgtcattaattccctttactgccactatgttacattgacttggaggttattgtctgcaaagatgaggcataggtatttgaatggtttgatttttcatctattttggagtttctttttctttattatatatcatataaacatccattttctaccccatctataacgctatatatattaagattgtttctaacagcattagtagaattgacttggaagtcaatgggatttaggtttgatttttcatcttgaaacttctacattttttttggaaagcaaaaggaatatattaatataacttgagtagaaaaagtaacccaagagttgcagagaattcgtccataggaacaaggaaaattcctagtctggccaagcatgcaatatcaataatgcaatgacagcatttcattgaaaagtaaactcgtttaagttgccataactccagtttgtctaacttgtaagtttctgtcttagaacactaacaagtaacaaccatcgaattagattctttattctcgatgtctttttctgataattccctacccgtcaataatttccttcttatacaatccatgtctttcattgttcaccttatcttcacagatttgcccctcttgctatttccttgaaattctagttcttaggtgcctttatgccatactcaaaatgtattacagatgtattaattaattttgattaaacttatttatccaatttatgcgtataattcactaagaaaaactgattaacttttcattgagatttataatttatttagtcacttgaaaaagaaaaagaaaagtttatcaaaaagagtataaaatgtttattacttccaataatagtaaggtgtgcaaaaattagtatggtaaaaaaatcgaactaaattggtctgtgttaatcgattcagttttatattcaaatagtcaaattaatttgaaaaccgtttaaagaacaatctagttttaaaaaattagctatgtatcgaattaatttttaatcaattttaatctgattttaagaacaaataaaaccaatttcgaactatttttttcaaataaaaaaatattcaaatgaaaatcagtttgattaaccgaatcgattttatagaaacaatttgattaatcaaaatagttttataagatactgtactatttttttttcttaaactaagtcgagaaaaaattaatttgattcaagttcgattacaatccgattccatcagaattaattctttttcacacccctaaatataatatatatatatatatatatatatatatatatatatatatatattgaaaccacatggatagggaggattacaattcagaaagtggtgcaacgtatactttgtgccttgctcttttttcttctctagtttaaggacgaacatttaaagagccttccagctaaccactaatatattttttttggtgagctaaccactaatattaaaaaaacgggtaagaatactcttatatatatatatatatataattcagcgcatgcaaagagaaatttcggaagagaagaaaaaaaataaatgatgtaatagattaaaaaaattattatatgtatatcactgcttaataaataaataataaaaattaatgagacaaatctaaaataattaagtaatatttggccttttgaaatagtcatggcctcaaaatgagttttcaacgtcaatatgtcataacacgataaaaccaaacatagacagatcatttaatttatgcaactggaccaggtccatcatcacaattcaaattaatgaccacaaactcgttgtcatgacgatgagaaagaaacgagatatatgttcttatctatggttagattttaatgtaataatcaaaagtggtgatgaagagtaactgtagtatctaataccacatatattctgaacatgttggactttgacaaagtacttgaaaaagaacgaataaaagtgtgcaatgcagtgggagcagtctcactcggcaatagcatcaaaaatgaaatgaaacccactcaccctcacctcaccaccatcaaatcagagtcgcaattcacggtcgcacgttgttcttctacggtggacacccacgtagaacatttttactattaaatattgaattcaatatatgatatttacgatatcttttaataaatgaagtcaatagatttttaacataaaaaataagttttttaaaagaatttttaatatctatatattattttaaaaataataattttaaaataaaatctactactaacaaaataaattttttttaagagatcttcattaacattatatagtctaacaaaaatagttgaagatgccaccaaatatgatcttagaaccttacggttttgtgcgtttcctcagcaccaatcacagcccgccacgtataccttgccagagtttgacaaccacgttgtggaccccactccgcaccacatactacatcagtcaaaaccgcggcttagctcaagccagcttgtccacttcgccccacattttttttttttttttacttttatttatatttttcagactacactattaaataacactacaatattaatacctccaacaacactaattagtcattggttccaatgaattcagtctttaaagatcttgttttcaaattttatgaatgaaaagatttgatcagtgaaaaaaaaatttaaataatactatatatatgtaaatacacaacagaacacaatgataaatgcaagaaagaaaatactaaaaggccaccacttcagaaaaagttcttctgctgagttaagacctcattgtctcacacacactttctctctctaaaagttttgaggtggttgggttcatcacttgctcctggtcttaatctgccaagtgccaaggttgccgggatgtggaattcacgcgctctctctgcgccactcgctctgcttcttcttcactcgctcctttctctcgtctctgctcagagatctatctggaacactctcagcggtaatgtctcgtgttttactaccatctttgcttctgtctcttttcacttactatttacttacctaataatcactaaccaagtgtacgatctgtgtttttcttttttttgtaaactttgatttcgtttgttactttgacctgagttcggatttggataaatggcttagctaagcttcgagctagtttatggtctatggagatattatatgcagtgcttagaaagagtttgacgtttctcgagagcttaatctgagaatatcatatgtgaaaaggaaacattagttatttgttgtcagggaaagttttggctgaatgaactgtttgcggattcaactcttacaatttgggtttgagcctaactcaacctcaaaagctagctagccttctccacgccaaggactagacatcttcgatgtgaagcttgcatgacttaacggttgacccaatagattcaacaatgatcgctaggatcagctccaatacctgttttagaatttagaatttgggttgtcatattcaatcttaaatgctagcttaagaaatgagggttgccccctatttatacactcttttttgccatatcattagtctgatgtaggatcttcaacaaacaattttttccatgaaatctaaaggccaatcgctgactgaatacgattcatataatatcagagactgttgccactttcagttttagaatatgttcttgaataacttttgcactttttattattattatttaaggaggaactttcactgtgttaggtgttttgaaacttacttgtatacttgttttgcaggaggtgcgccgttggttgtagcacgtggtggattttcggggatacttcctgattccagtgatgctgcctataatttggcagtaataacgagtggaccagatgtctatatatggtgtgatgtgcaattaacaaaagatggagttgggatttgccagccagatataaaccttgcaaattctacttacattgcaaccgcttacccaaataaaaccacaagttacttagttaatggtgtacccacccgtggctattttcctctggattatactctgaaggacctatctagtgttgtctgtgagtttagtttatttcaaacatgtagttttattgctaatagttataaactttcagtatttgatggactgagtgattcttttctacggtgtatatatgtgttgttgatttaaggtttagcttctaatcaggatctttttaaacccttttctgtctcagcttgcaaatgagctttgaagttgtttcttttttctttttggatagggaagttgtttctttatatagttgctgacagtttcttgtttctggacagtaactcagggagtatactctcgatccaacctgtatgatggcaacaattttggaattcttactgttgatgatttagttaaattaacgcaaaaaccaaaaggaatatggttgaatattcaggtaaatagaatgaatgcataatccattctcatgattcagtctccttgttttaaatctaactcttgttttctcttatattttaaagcatgatgcattctacgcacaacacaattttagtatgcgaagctttgtgatttcagtttctagaagagtagttttcagttatatctcatcacctgaggttggttttctgagaagtatagcatcacgcttcaacccaaaaacaacaaaattggtcttcaggtttatgggacagagtgatgtagatccatcaaccaatcggacttatggttcgcttttaaaaaatcttacatttatcaagacatttgcttctggaattcttgttccaaagggatacatatggcctgtagatcatgcaactctttatctacaaccacatacatctttggtctcagatgcacataaagcagggctagaagtttttgcatcagattttgtgaacgatgttccatctagcttcaattacagttatgatcctcttgccgagtacctccaatttgtagacaatggtgacttctctgttgatggtgtgctctctgattttcccataactccatttgaagctataggtaagctgtttatttgtttattctgccatgttatcagaatagcctgccacaattagaatgcatttgattttatcaaaatgttgtttacgtagacgtagggtatgcttggttgcaagagtttagaagggagacaatatttgttttatgtaaacattctaattatttaagattttcttaaataacagaactggggggggtataatcagattatagtgtaacttgccaatcatcacttattcgtttttgtaaacattttataaatgaaaaatctgctgtcatcacttccccttcaaactcttccaaccaaacatatccttgcatatattttcagatttttactatatacagtatttgtcccttgggatggagttgatgcagctataaggttccattaaataaaattatcctaatgtcttcctaatctcatgctcatagtgtttgtgtgaatcaccttaaacgtgcctcttgcatttgcttgccttttcaattttagagtggccacggatggcttgtttaaacttcatggggcaaatcctcaattttaatcctcagtgaaattgttttagtgatcaatctgcccaaaactgatatatttataagctaatttatccttactatccaatctttgtaagcagatactttcactttgcatgagtatgccactaagattgttatgcaatccttaatcaatggaaggatacagatgggatttatgttgactttgactaaaggatttcatgtccgaatgctggtgcaagtgcatgaacaaagttactaaaaatatgtacttttagccaatctctcaccacctcctgctttcaagctcccactgtaaactaaattcagcttagggcaggctcctttaggcagatcagatatggtccagttatatactctttaatcaactatagtaaaagattttgtcatgctgcatgaaagcacatagcgatgtttgccttctaggcattgcattcttattagctatcctaattagaattttctttctcaattttaaaatgcttttacatcatataagcataagacataaacatgtagttgatattagtggcttgtgggtcctactgcatacttataaattgtaatctcagaacatgtctgtatgtttgtgtttccaatccttttttttttttctctatttaagtagatactgtgttgtcttcttataatgcaggttgctttgctcacctaggcaccaatgctacgaaaaaaggtaacttgttttgattttggaatatgtattatcatgttgttcttagtgatttctagttgtttgactgtatgatttttatcattcgatggaagcatagcttgcattattgatgatttgtttctctcacttttttatcatgtttcagataaaactttggttatctcaaaatatggagcgagtggagattatcctgcttgtaccgacttagcatataataaggccatatctgatggtgtggatgttcttgactgtcctgttcaaatgtctaaggatggaacaccattttgcttaaactccattgatcttatagagagtacaacagtcgcccaatcaagcttcagcaaatttgccatgactatccccgagatcaaatctggcagtggcatatttgcattcaacttgacatggaatgatataaaaagcttgacccgtaagtctgaaagttctgtagttgttagctatttatttctgtatttgcatggagttaatccagacttgtcaaagcttaattattattttggctgaattgcaattttggtccccctagttttccaaatccatgattttggtccccttgatttttaattgtaacatttggtcccctagttttatgaatttgtgattttggttaataattatgattattagagagattaaattaattataaattaaataaaaattattaatcattaaaaaggctttgataaaacactattaaacctaatgtggtgttactgctggtggagtcgcgtgtgacacaatggagatagaagaggtatttgcagagaagaggaagaaccgtgttgcagaaaattaggattaataattttttattcaatttttaataattaatggttttgattaatttataattgatttaataactcaattaatgataattatttgttaataatctatctggaagaccaaaatcaccaatttataagactacgaattaaaattcagggaaccaaaatcatgaatttgagaaactagggggactaaaatcacaatattattttttaaacaaaacagcatgcaaatgcatcactttagtttctttaatcccaactatgttggcaccaaagcaactaacaatcacttactgcacactggaaatatattaaccaaaaagaagaggaacataaaaacaacagatggggggacaagaaccaaacccatgaagcaaaaagcctaatggaatcaataatttggcatccctactttgtcaaagcttagttgactgatacgtcatatagccaaaattcagaatgagatatatgaacattgaaacaagtcgtgttttgggaataatggggaaattagcttacaacttcactttataggacaattaatgtctcactgataaattaccatggcaaaattttccctctcatatcttttggtgcctttcacttgctgcctatgataagtgttataacaaatatttgacatatttttctcttctctattttccctgcagcctcaatattgaatccttttgcaaaatacagattgttcaggaatccaaaatctaagaatgctgggacattgttggcattatcagatttcttgtccttgacaaaaaatcagacttctctatcaggtgttgctatcattgttgaggtgtgtgcttccgtgcctattcattctttttgtagtattcattctaccggctgttatttgaacatataattttgtttgaagaattaggacaaatttttgtgagaacggcttagggtcacttaagttatttaataattcctatgaatgatttcaccttggaataagaggggaaatagaaataagaaatattaagactatcatgcattatttctatcaaattgttacaagacctgtttctcacttgtttttgttggccatactttccttctaaatttctgaataacttggccaaaaattatgaaatatactgtttttaactctttggagttctacttgtacttcatgcagctgacaactttctcttttgaaaccaaaaacaaaatgactcacctgccaaactcgtgtgaatttaacatcaaatatttcttcactgactctattcaccctgatttatttcaaccaagtaaagaattatttggcatgttccttgtgtgcaaatgattttttttccttttctttcatcttctatttactaacatgtatattgtgttgttgttgttcttcttatcagaatgcagcctatcttgcagacaagcaaggattaagtgtgattgatgctgtcatcgatgttttgagcaaagcaggttatgataaaccaggatcccaaaaggtttatattcaatccactaatagttctgtactgctgaagttcaaggagaaaaccagttatgagcttgtgtacaagattgacgagactgttggtgatgctgcaaatgcagctgttgaggatataaagaactttgctagttctgtggttgtcaacaaggactccgtaattcctaataatgatcaattcctgacggcctatacaaatattgtgccaaagctaaaaaatgctaacctctcagtttttgtagaaacattcagcaatgagtttgtatctcaagcatgggatttcttctcagatgcaactgttgagatcaactcatatattgagggagcacaaattgatggtatcatcacagacttccctaaaactgctgacagatacagaagtaagtgctagcaaattctgctgtaccatgggttgattgtttcaatataaacagtttttactgaaataatttttctccgttctactgcagggaacaaatgcttaggtttgggtgacaacaaacctacttacatggaacctgttcaaccaggtggtctttttggactcattaccaaagaattcttgcctccagccgaggctccgtttccacccttgacagaatctgaagtggcagagccacctttgcctcctgttgctaaaatagccccagcttccagcccgaatgccggaaccaaattaccacagggaaattcacagcctaaggtcactgtctgcttcttcttgtccactctggctgtgtttatagcttctcttcttctgctttgagtaaaatcatctctaaacttccttctaagaaaaaacaaaaaaaaaaaaaaaaatggagaaaaagttgcttttggtggtctcaaccctctattttccacatctcttctaggtttgagtggcatgaagcttttggcttcagactagatgaacaatccacatttttttttgttcttcttaaaaggagcaaattctttcaatcttatttgttgtagctacgcttgtccattcttagttcctcaattgcttctcgggttggatactatgagcacaaaagcccgcgtggtatatatctatgaattctttttagatgtgtattttgtatcttttggtgtaagatatatttatatttaatacttgttggggtgcatttggcattagattaacaattttcccgaaaactatctagagcatatacatggtttgattgtttcaatataaacaatttttactatcccttctgattctaaatgtacttaacaaatagcgatactgaatatccaattcaaccggaaccaattttgagctggcttgattagtaagtttgaagatgtcaaaaaatttgtacaactactaagttttacttaaatatcgttttgaaaaaaaaaacttaaataatagtaatttacattagatctaatattgcaaattagtttgttttgtattaaataaaataaattattaaaaaataacatttttggcataattatataaatatatattaaatattttgttaatggatactttatacttataatatgataaaaaaaaatgtatgttaatgtcaacaagttaaaattagagaaccactaagcacatagataatgtggtgcatagttattattgtttaatccgtgtctcttgtgtttgagttttgactatatatagtttaaatacttaaagaaaaagttttactttcagcatgtagtaatatgatctgattcgagaaaaaatatctttcatggagaataaatgtgtcttttaaaaataatttaaatttaaagcatatttagtaacgtttgaacattatcaaacgagtacttgactacttgttaaattgtaacatgtgtacggtaaggtaaacgatacatgcacctaacaaattatatttgactttactcacaatgagtggcacaaaatgggtcggtttccccgatttgacaatactaaacaaaatggtggatctttagctggattttgaattcgtgatttcaacaggcactaactacactaccatagaagattttttggcgtcatcttttcgattaattgcagttgctattaatgagtaaatttaaaattgtgccaatttctattgagatttctcaagtccgtttagatagagaatttcaactgagtaaaataaattcagataattaaaagaaaataatctaaaattcattattatttgaatttttttttttaagaaattaaatttttaaaattttaaaatataattttaaaccactaaaaatgtgaaattttaatttccttctaaaagagtgagaaattgaaattgaaattgaaattgaaattggacacccgccgttgaagtcgcaagacaatcggtggcgctgcacctggtgctgtccttggcgacaatcagcattagaaggttgtaaccgtcgaccaaactcacgtcgtagaagtccaacccattggcactattgagagtgaactctgccaatgtcgtcggaggtttgacccagcccaacgcactatactttgccgaagccgcaatcagcaatggcgcaagagaattttttgtcagagtcttggtcgtagagggttgtgcccatatccgacccgaccaagacttcaggatttttacgttatttgatttgcctctcttgagggtgaatctgatggtgggatgaggcggtgagatggtgctagagagagtaatcttgagcatatcgtgtggcggcacttgttcacgatcttgaacgatgttgaaaatttaatttcttcatctaaatataaaattttgaaaatgatgaaatttaattttattatcctaacacagaattttgaaaatgaaagaatttcaattgaagcatttgaaattcttaaaatttaaaattctttataattttaaattgcttcatccaaacagactcttaaattatactaataaactcagaaactagaaactaagaagattgcatatcttacacccacttaggagtctccttgaggggtgtcattacgctatctctttgttaccatagcaataatcattgtgttccttattacaaaccctgcttcgacaaagcattggaagcaataatggccaagtatggtgggttatggtaaacaagtggaataattcactattgtttctccttttatatgaactaatgtggatttgagaaacatatatatgcccaattaagaagacataaagtatgtggattactcctaaattgcactttcaatttgagttgggtatgattttggtggcacaagcttcataattcatatagtcagttatcacgttagatgttttctttccgattttggtggcacaagcttcataattcataattcatatcttttagtgactgattcctagtagggcaatcatgataatgatagctaatacttgtgcttatcattttatatagatattttaatatagtctaatttttgcagatacgtgtgccaactgccaaggggtattctcagctcatgctgagatatgcaaaaaatatttcaggcatcaaaagatataattaactgctactattgataaaaagtttattagtaacggttacagatattgttaatatttatttttaaaaagatattgttaatattattttataaataatgtatggatttgaaaagaacatgagatctagataatgtttaatggggttaattttagtgtatttaacttaatatcattaaagaatattctttaaaatattttaaaatatatttttaattaaaattatactaaagtatttttaatttaccaagttaccattcacctcttgctacacattaaggttgtttctcttcttaaggagttgcaagcaaagtaaaagctttgagagtgataaaatgtgtaactaaatttgttattagaattataaaaaaaaacgttgttagtaatatataaaaaggctaaaaataacattcagtggagaaaaaaaatttaggactgaaaatatattataaaaaaattatgaaaaattgagatatgtactaacaatgttaataatatatgacatgggatttggttgaaaaagtatgaaaatatattatattctgatgagtaattgagaaaaaaaaaagttatgtattgttagtgtaaaatgttttacacaattatttaatcataattaattatgtatgataaatttattgatttttaaaataattattttaaaataattcaaatggtgatttatgattaaatgaagtgtaaaacagttttacattatcaatacatagacatcaaactctaattacatgcataattaacactagatacttactaaatatatgtaaataacccatttcaatggtaggtgcaatggattaagatacaattatttgaataaattaaactctacttaagagagatataaatattttgttgtctttcttttttatgttaatatatattttacaacttcaagtttatgatattttatttcatttaaaaattttcttttaaagttctattaattttcattatgattttttattaccaaaatattgtttacactatcattttttgatagatgcaaatattacattaaccatttcttcttatattaacagatacactttcctcttttgcagttttctgccttgagagattttactattacatttttctctttttactttattgtataacttttttttccttctcaattactcatcagaatgtggactttactagtccatggcatttttgaatttatgagttcgattatgggacgcgtcatgcttttgttctaatgatgtcatttttctcgcacccaacattgcttaccagtttgtcacggctggtgccactgccacataaagaagaagaaagaaacaagtttcaaatttcaactaataaatgcaatctgaagattccaaggagatgcaaagaaaacagataatactaattcttttcagactacaggtattttatgcggaggaactttttttaactatcacaacaattctttagcaagtttaattgtttcaataaagtgtcaatgtatcattgaatgattatattaacaaatgattaaatacaaactgagattaaagaatttacccaagaaaaataaagagaaaaagaaaagtcgtcggtgaataatagctaggctaattgattcagtgggaacatacctcccaaaataattgagtttttgaacaattaaaactcttttaatttgcatagttaacattggaataaacccttatttgcgtgtagagtgtagactgtgggatttagtcttagaccgtgtttgtcatcatgaacaatacacgcacgccgagatcaagtgatcactttattcaacatttttttccctctctttttctttattttgttgtacttaccttggatggaatggaagcataattgaagatgactggggtttttcctagtcattcattgatctccaattgtggttttcatcgaatttcgtatagttaccgtatttttcataaaacccatttttcaacgtgttgattaattcctcccacatgaggtgctgagcggttgatgatgaaagatatgactcaaacattagtatttgttatcatgcttatgccacaataatggtgtctatgccaatagcacaacacaaacatccctctaacaagtgataattgcgtgtacaaattcagtgatttggtttataaagcgagaatgatgtttaaaatctcgctaataatcaagtttatctgtggaatcctttaccacaaactatgatttttaaaataattataataaaagacaataaacttactagtgagttataattgtgatgatgtgttaaaataaaactgttttacatactcaacgtataatcgattttttttccacttaaatcttccaagatcataatttgaacaaaagtaacaaaaagtatttttttttttgcttaaaacttaatttgatgagttttcaaagaaaaatccaaatataatccataaatatgtgttttctaaataagtaccagcattaacaaagttatataatatttagacatctcaacgtgattacatgtactcttttttcctcttaatgtgtgttgctaaatgtttggaatttttttttaattcagaaacaaaatatggatgagattatccatattttttcatttaaaaaatctttttaatctttctaatttaatatttttttgttttgcatccttataaaattatttttataattttagtccttataaattatgtttgttttatttttaatcattaaataactttagataatactttggataatgaaaaaagtgatatctaaagtgttgtaaagaggaaaaataaaataaacataattcgcaagagctaaaaataaaatataaaaaaatttacatggataaaaaaattaaattataaggactataaaggtatttaagcctttttttatgattattattttaattttttctttaataattttaaaataaaattttatatatacgtttcaaattatattttttctattcatatttattaggctaaattttaacttttatccttgtacaagacacttgttttcaacaaaaaatagcttttaaatgtccttaattacatgtgaaatagttcttcattcaggccatcctattgttctccattcatgatatgtgatgtcatttttaatttggcctatacctatgttctcagtttacaattcctataaaaaagagattgatatgtggcttaatatgtcattacatgtgtgtatagttaaacgtaactttaattatatcaattttaaattattcattgataattgctgatcgaatgtaaatctataagtaaattatcctttttttcattcttttatgacttctttttgtgattaaaatatagaaattaacttctcctaaacttttatcaagtagatgttaagtttagttgattcataagttgttgattgtgtttttgtagaaatttcactgcaagaaaatgaaaggacaatggagggtctgaagctactcgttaagtgcgccagatgctcgctcagtgcgacaggcccggtcagcgcgaccagcttgcttagcgcgtggtcacttattcagttggacaatgaaggtgtgctcagcgcgacctttccgcactgagcacagaccacgactttgggttgctgttaaaaggaaaaataagggcacgagacaaaggatctggacttttggagggccagagatagagctagggcacgagtgaaggtagaaatctcactcatttggggacgtcttcatccattttcttctattatctttcattcttcttgctttcttttgtatttgtaaaccctctcatggaaatgggaggctaacccatccattgttggggttccaacaaccaaacactcttgatgtaatgattataactatctatttaatgttattttcgtatcattgtagtttttctgagctttattcatgattgtggtttaatctcctatttgcatgcttgttataggattttaatgcattggaaaatgagaactgaaaaacatttctaaataatatcatgtctaggaataaagtggttttgtttagcctatgttacattttgcatctttactcttaatgcaaattatttgatggaacttgttgagggatcaggagtgaaattaggtaatttaggacctaacacttgaggaattaaggttagaacacattagtagatgatggtgagcaattttaataattaaacagagaaatatttgtaatattgcatcaaaggtagttttggtgagttgagccccaacacgtcataatcctccgcattacctgacatttcaatctcaagtgtttgtattctatctctttattatgttatggttaattatctttatttatgttgaattttacatttccgcattaggattagaaattatcaaacttaatttgtgttcgcttaaaattaaaaatatattaactctgaatacaagcaaaatcattgtggaattcgacactcagacttaccatttatttattacttggataattcgatgtgcttgtcgaccgtttaacattcatctaaatccaagatatggttaatatattcaaaagatttgtttattataattttatttataatacgatttatatattaaaaaatatttattaactataaattttaactatataaaaataaaaatttatcatgtgtaatgtataagttaaaatacttttcttattgtaagaaataaaaactctaaatctagttcatacaattatatagatgattcagacttcaataaacacataaaaaaatatgtgtatttttcttttactattgattattctaatatgatctattgacttatatttgtaatttttatttctcacaataacaagaattcttatttaattaggatcgattatatgttagttagcggttacatgaccatttaaaaaaaccatttacttttttgaatattttgactattcaaatattatttagtgatttgtatttgtagttcttatttctcataataaaaaaatttctcatttgactaaaattattagttagaggtcacgtaattatttaaaatcatgcgcatttttcttttaatatccttaagaccattcacaattgatgtattttcttagaccatttttagtgattaatctcgtaagttacttataagattatttcatgttcttaggtaaaaaaaaatgtccaataatatatgctggctaggtttcataaaaaaagaagaagaaagaattcatttttttaagactcacgtcatcaaaatatttaaattcattataatgatcgtctccatttaaattgtttccaaccaaaatatatttttcttcatcattcctatttagttgtttattctctaaattttcaactttaaagtctaaattatctagatatgcataattctaaatagaaatagtataatgttagaaaaaaacaattatgaagagaaacattttaagattcagtatgaatagcaatttctttctttcttttccgttttattaaatgaccaaaaagttgtttctaagcaacatgttttttgtggaagaaaaaaaacatgttttgaacattaaacatcaagtataaaaaaaacaaattataatctataaatcaaacaaggagtctctaataattaaatatataatgtatgaaacaatggcacctgattgctattttaagccttcaacttaaactcaatttgttccaaaattttaaagtactagattttaatttgattatgaagataaccatgaaacttattgttgtttgaaatataagagattaatgtagtaaactgaatttttttttaatcgactgatataaaatattttttaatcgattgatataaaatattttgtaatcatcaattgtgatataaattatagttttgttcactgtcatattgttgttatttagcataaaaccattgagcatataaacatgttattttccctctatacttcttatcttgatcgatctcttctttattctcagccttgagcttgaaggttgtagttttcacacctcgtaaccctgcttatatttgattattgactccaaaaaaaatttaagagagaatgagaagaaagaggaaaaaaatatattctagaataggagtataatatattctaaaacgaatagatattataatatatatacacatatacacttgtcatattatcttctatcattctattattattattttttgaaaactattaattaaaaatttaattatataaattttttatttcgataattatatatactaataattaaagttttatatactatcttgtgtctccttaaagatggttctctatgtaatcgcctacaccaaacacgctttggaccactatttcttgacccatatctcactttacttcgtcttgcatttttagtcataaatcaaccttttttttcacatggggattaatttgatttgagaacctttttaaccacacaagtaactttttgcatcattttttgtactacatatagaacaaggatacatcagaaattaaaattataattaaaattatttcatattagttacgatgatatttttttctgtaaatatggttaagcagtttttttaaaatatatttatatgataaaagccacgcctcgcgttaaaaaaattattattctcaaatcacattttaagtataatcgaatcatttgaaatgctccagatattgtttagtataaatgatatgaaatattattaaattaaatttatgctccaaagttcaacatatttatttataattaatagaagcttaattattaaatcaactaatgatatttccatttttatttttgaatgaagatttttcattttgagaattaaatttaactcataatttctttttgttattattaagtgtttatgcgtagttcaactaatttacctatttgtttctttcaaacttaaccttaacctcatctataatggaacaaagagattcgaaaagaatatttttaatactttgacaccgagtataggacaaagaataaaactaaaaagaaaaaaaaaaagaaaaagaaaaaagtactcaacttttgaaccatttaatttaattaaaaaattataagaaagagtaaatagacaaacaaaagaggccatacccatttccccgaaaattgtaaagtagaacaaaatgatgaagtgcgaaggttgttaaaaacaagtcaagactttaattaaccgattgtgaaacgtgggtgatgtcaattgtcaagtgatgatgcagaggcacaaatccatctaggacccaagattttttttttctttctcttctgcctttatatgatatttatgagccttaaatttgatttgaagagaaaatcacacaattcaacatgacaggtggtaatcatgtaacaagtaagatactatatcatactatatgaattcaaaaaattcctaagtcctatgcctattcctatgaaacatagcacactacatgacacatcatgagtgcgttatgctgacgttcataggaacaaggaaagaaaaagaaccttcagctcaagcaaactcttattctattctatgctatgacctcaacgttttgagtttgactttccaagagtgaacctcttcctctctttctcacgccacaccccccactttcctatatataccttcaacaatctttgtcttgctcctcacatttccatcattccataaacttttttctttctttctcttttgcacttctttcataaaatgccggaccaagctatttgcagttgcattaatgaaccttgtcttgtagccagaaagttcttggccagacctcagcatgagggtgttggagccgttgttagaagaagcatagggaggtaagacttaaagagagatcaacgataacacagttaatcttagccttagccttagccattatgcatagttatgattatatttaactaagattaatttggatcctaaggttgaaaggtgtagattaactttatatgtgtatagtattgcaagttgtttaaaagttgagctttttgaattgattggttttgtgggtatatatgttcagatttgaactcaagtactttgatcctttccttgccttggatgaattctcaggtgggcatctctgtattttcctctgtttttttaatttggattatgaaaaagtatgatggtcaatcttgtattgtattctaagaatgtgaaattctgaaatattgcagtgactgctcctgctgggtttcctgatcatccacatagaggtttgccaattgaatcttctgtgtcatttatgttcttcaatgatctgatttgcttagtttctgacttgtttcttccttgtggtggtttttatttttaacaggatttgagacggtcacatacatgttgcaggtagagcaaatatttattgttttagttcatgggcttttcctcctttgatcattgattataatataaaactgttttccaacattagagaaaccacgttttgagttatttcattttttgttccaatccgtgttataaagtcaaaggcatataatataatggccattatgcaaatcaacaaaattgaaaaacgaaaaattaaaagtaaactaaatactatttcgctttatgatttctttattctatattagctcatagttttaattgagctaagtatcagctcaatatggtgttaatctttgtgctggtggtgtggcaacatgtaagtcacaaattgatgattcgttaccaattaagattaggaccactaaaaccataccatttaagattgtgtcctgattgcaaatagtagttggttataagcacaaacacaagagtgaccccacatgttgatatcttgtttgcttttctagaatgccaactaccacttgagtgtaatgtaatgtatctaaagttgtgtacgtgatatattggtcacatatgcttgtgctgatgtgctagcctcacctgaatgcaacttttttgcgcaatttagggagctgtaacgcatgaagattttgaaggacataagggaacaattgaagctggtgacttgcaatggatgactgcagggagagggatagttcactcagaaatgcctgcagctcaaggaacccaaaagggtcttcagctgtggatcaatcttgcttcaaaacataaaatgtaagtggacaattcttctgtaccaatgttagagacacttatcaacaaacaacttaattaaatacttattgcccttacaaaaattcataaatattaaacaacttaattaagtacttgttgaacttacaaaaggtcataagtcttttttataagtgtatttggataagcatcaaatatatatatatatatatatatatatatgtttatcaacaaaatcatttcaaatgaatgaaaaaaacacaaaagttactattttttgcttcaggatgacgcacttttggagtggacacaaaactaaatatagattaaataattttttttatagatatcctgtaattcatttatacctagaatttaattttttaatgtaaaaagctccaaataagagtgaccaagagttatttttttatgaaatactcaaatcgcaatcttagccatattagatgacgtactttctgcgtcattgaagatcatcatcatcatcattggtttgggggataattttggataatcctcatcaccaaatatcaacgagaccgaaaggaacttcactctttacaaagaaacagtcaaatcttttaaaactttctgaattaagatatgccttccttactttcacatgtgactttttcctcatgattcgccatcatgtaccatttcctagaagtgctcttaaatagggcatcaaaagatgcaagtgtgcaaaagggacttaaatggccagcataaagaatgtgcctctcaccccatatatcctatagtgatggtggaagcttcaataataagagcaataataacatgttgccaatgctagttcaaaatttgtctggttatggatgccccactaaaaatgaattcaacttttccattagtgtcttcttggaagtattatttgttatcctttaagaagcatttattgtctaccttgaagtttacgttaaattggtaaagtagtttcttcatttagactctaaaactttggtttaatatgtctttgtactattatcttataggattgagccaaggtaccaagaaatgttgagcaaggacatagctgaaactatgatagatggtatcaaagttagagttatagcaggggaagctcttggaataaagtctccaatctacacaaggacaccaaccatgtacttggattttactcttaaacctggtgctcacttgcaacaacttataccaaagtcttggaatgcttttgtgtacatattggaaggagagggtgtatttggaaaccaaaagtctcaacctgtaacctctcaccatatacttcttcttggtcctggggatggcctagaggcatggaacaaatcttctaaggtccttaggttcattttggttggaggtgaaccattgggtgaacctgtggtgcaatttggaccttttgtgatgaatactcaggaagagattgaccaaacaattgatgattttgagaactataccaacggatttgagaaagctagacattggaggtctgaaagtgcaattagccttgattattgattttatttaatgtcacatttgttggttgatttgggaaagatgggaagcaaaataagttctgatgtatattggaatgtatgaattaggcgaagagtttctatcccttttacctttatatttatgtcaatattatatgtatgcgtaaattaaaatccagatgtagtaagttaaaagcagagttaaaattctagttagttaaacttgttatttttacttcttttttttttattgtttttaaacttctcgttataatcctttaaaaaaacctgacacgttactcaagataaaccaaatttcttgccatttaaatccacaggtgttaataaaaacctttttattcttataccttatctaaccattcatttccattttagtaaatcgaaagagtagcgctaggaaaggaataataccaacatattctttgataattaacattttttaaaactttcacgataaaatttcatgtctcactcttatttaattaagtaagcgtaagattttactaaatcatagaattatttccattattatatatattaatgtttagaaaagacatatatcaaaaaacatgtttagaaaagacaagggtccatttgaaaaataaaaataggtgaattgacataaaaaaaaaaaaaagttgaataaaagtttttctaatcttatggatagaacaaagtgaacaaaccatcaacctcatttacatgactttccatgaaattacaaattacctgccgagtatgacataaagtaccttttattttaggtataaaaaagttttacaactatattacccttttattaataatgatttgaggtgattgttaacgaaaaaaaaaatcttttttctatataattgatccattaagtgactaatacagaacaagcttgtggaattaatttgataagtacccctggtattataatttatattttctctatccatatactatcacgattaaaacttacggacattttaattatttaaatttgatatatgttcatgtaatttaatgttaaataaataaagttgcattatcaggaaaaaaaaatgaggctcaagttgttgattattatgctcagttttaggaagtgaaaacgatattacatttaatttatttattttatgaaaagatatttatattatttccaaatggatctattcagcaacaaccattggtaaatcaacatacgaatttgctgccctaactaggtaataagctgtaaaattcgtttgtctccttacaaaataaacttgataatttggtaaaaactgcaaaagtaaactgactaattataactcccagcctcacaagatttggacaacttggccaaaagtttacaaacaaacaaacatccctacccatgaaacaaaccagtgatatcatgataaaaaaaatgaatcaatatctcccaacacccaacccctgcatgataatattatgcatacagcaaccaaaagatatgcgtgaactgcagcaaccatatttgcttgatatacatttctacgaaagaagcttaaccctctctaacagctaacatcagacttcattgcagaaaaaataagttgatttctgctcttctgaagaaaatgctctttgattgtcaactgcatgcgatggtactcctcaccaatccaaacataaacgccatgttttattcggattgacgtaaataaaattatcaaggattacataattttctttaccatatatttaatgtcaacctagagataagtatcaaataatctatgcactcacttgtttgtgttattgattatattgtattatctattaaaatattattcattgtaaatattttatcatgtatttataatatgttaaactatgaagttttaatcattaataataaataaaataatttgtaagtttttatattaattataaaataatttaagagtgaatttacttaaattcgacaccttgtagcttagttaaataagaacgactaatgtcacataatgttttaaaagtaaagtagtatttataaaataactatgaccaattatgaagagggaacattaatgtagagttttaaattttcgattataaattattcatgtaggaacatgtatttatctaataatgtgtttgttttaatgcatattactttaaatgaaagtttttgtcaactgtttaacttaaataggattgttatttagaaagaaaaaaaaaacttcttgaaacacattgaatcctcctctcatattggattcacattcaacctggtttaaaatgaatacaaacacaccttaacactaaaagaggaaagttaaaaaaattgaaaaaactaatatgaaaacttttacaaattagtttagaaaaatttttttttctttcttattttattttcctataaatgtatataaaaatctttttctaaacaaacccaattttttttaagtgaaaacaaacttaaatttaccacatagcaatgttaaaattagataatagctcggatacataattcttatattaagagatggaataaaagagaattgaagaccaacataaaataagttaatagaaattttttataagtatttagtgacaaagttagattttataaaggaatcaacttgagtggttatttaattgcagctaagtgacaaattagattttacaaaggaatcaatttgagtggttatttatttgcagctaagtgacaaattagattttacaaaggaatcaactgaagagcttccgtctatgggtggggatgccaccgcaaacatatgccgccgcgacagattccgtcttctatggaccacagatacttacctgaacgtgaaattgtcattgataacaaacatcactattaaaataacttagctttgtttatttttgtggtggtcatttgaaaggctaacaacttgagtatatgtagtatgtagttgacactattaattagatttcagttatctacatttcaatcacgtaatcaagttgcatttgtaccaagtttgataagatatgtgctgttgttagaataaatggatattcaagtaaggactaggtgcttatatgcttttgaagtatatttccaaccaagatcagaaacataattttctaattaaaatcataaatttgtaaatgtaacatgtataaccagaaaaattccaaaattgcagagtttaactttcaaacaaatatcgctgtcacctaatactaacagttattatattagtaagtgcacgggtcaacctaaatcagtcatcataatccaagttcaacaaaccacgaacatgtaaataatcatgtccttcgacaatttgttgtcacccttaagttcatcaaaaaagaaatgttgataaccgctacaagaaacctacaaaaataaaaggcaaagagtgcacatcttatctacatgatgctagaaaatcacgataccccaatctcttatcgagatgtaggataaggtcccttgctgcgtttcttcaaagaatcggagaaaaaggagaacgcatcttttagttcatctggaagagagagttgaaggggcagtaccaaaggcgaacgtgcattgtgttgcacaggttttttccaggatgtgggaacagcaagtgctggttgctgcttgtttagtccttccatgataaaagaaaatgccccaaaagtgagacagctctgcataagagcttgtggtgcacctgtaaaatcctagaatataagtcctgataacaaaaagtatacaaaatgaaatttacacgtgtatttagctaaacaatgaattgaattttaacaatagcaattattggaaggcattctgcatcagcaaatttcccccctcctccatattaggtgatggtttgggggaggacaagccctgacataacaatcaagttgtgtcttggtgacttggtgacttgttgatcatgagttcgaatctggaaacaacctctttgcatatgcaagaataagattgcgtacaatatccctcttccttaccttctatatagtaaggagcatctggacgatggggtaagtagttttttttcttaaaaagtcctttatcctaattttttctttgcatattcagaatagtcagattgacaagtcctttatcctaattttttcttacaagtttcaaagaaaggacaaacttatcaatttatttaaatatataaataaaagatacctggaaaacttagagcaagaccagtgcaacatccagctacacccgcattaatgactgtagatgcaaaagaattcacattaccagagcttcactaaaaagcaaaagtgacacattttataattaaatattcataccatcatcttttcctctaagtcttttcaagatgcaaacaaccaaactatgaactccagacaaaactgcaaatgtctaatgacaaaaagaacaacataattaattgcaagctcaattgaagcacaaaaaaaatgacatatgaaccaagtatccaatgtaaaacaagcaggaaaaaaaggcagcgagattctcaatgtacctttgcataagaccctgcttctacaaaggatcctttaaaacctttcttcttaaacaatccagcacctgaaacacaccataacatgcatcctcaagcaaaatcagtaaatcttcgaagaagaattcaagcactgaattcttaacatactatagacagaaacagtaaatcttcgactaaatagttgaacgaagaaattaggcttaaacggtaattagtctatgaaacgacggcgtaatgcgataatacggagaggagagaagagaagagaagaaccgtatccaaagatggagcccatgagagcgccgccggcggagtctgtggcaaagcggaggaggcaaacggcgggagcggcggggacgagggcgttgggagaattggaatcgggaacagtgtcggaatcttgagtctgagaggttgcgtcagaattcggcgtcgccatagatgatgaagacgttgaacctctcttctgtgtcttctgcctctttgggttttctctttttgattctattgtgtgcgagtgagtgagtgatgttatccctttgcaacatcctccacgacgctgttctattcccttccacctttttcactctttttaagttttaaccataacgtacattttgagataaaactatttaaaaattaagttattttaatcaaatgctccctccgttatattatacttatcatcagaaaaaaattattttaaaataattattattttattttaatatatatatatattagttttttattttattctttataattaatgacgaacaacacaatatataaaataaattaatgatgataagattaattttatatatttttattatttttatttatttattattattttaatttatataaaaataacctagaacaattattattttgagatcgagagagcacaacatattatcgcttagagcttcttctttttttctatttttaaatgtactgaaaataccaattcaaattgtttgaaaggatatttgtgaaatcctatgtctggaattgaaagcttgacataataactgtcatcaactaattatttaaaaatatttagatattaaatgaataatttatatcgaataagtctcttcattaataacagaaagaagacatgaataatttttaaatatataatattaagacgtttttcctgcttttgagattatttttatttataaataaagtgtatttaaacgagattaatatgaaaagctttttttctcccgtgtttcaaaagtttttattataaataaaaattttacttacgactgaaagctattgaattatttttccaaaaacttttattttcccattttatctttagcaattaattatttaaaatataaaactaattatcatgaaaaaacttcattcccttgcctaaaatatactcattctcaatataacaaaaacaattaatacagtattttttttatatccttaacttaatatagccttcacaatattttaaagtacaccatatttgtgagttgccttggtttttgggtacagatttgtgtgagttgtgtttgtatccgactatccgttctaaacaatatttcctcaaataattcataaaaaaatctgtagcttctgtatttgccagcaaaactcaagcggtaaagaacaaataattcgatgttattacttttacctactgtcagtacaaacagaaaagaattcaaactccaaaaaccaagtgctcccacagcttaaaaaatagaatgaattttaaaacaacacacacagcttaaaaaatagaatgaattttaaaacaacacagagaatataaatggggtgtattgatccaagaaggatcttctgatgctagacaaacttttggaagtttgattgttaaactcatcaattgttaatcaatccaactaatgtcgaattaataatgctgttgatagattgctccaaactctactctccatgcctgatcatcatgggaagttgcatccttgtgaacatcatcagaatcctctctatatagtggctgcagtgcagactctggtaatttgctctctgcaaggtactgtttcatggtaacaatctccatcttgtgttttcttttcagcttatccatttgcttttttagcttttcatcatcttgttgcacttttctgaaattctcctgtataagaaatataaaaatcaagagaaaattagagttgtccgaaatggatcatcacaaaatcgttttccacaagtcctatctaatatctattgattttagggagggttgcgttaagcataaagtaatgcacccccaccaagttagttcatttatcaaatgcatttgaaaaaattgatgggatttttacctctgcaacagacgctgcatgctcagcttctcttagtctgacaagtagttctccagcagcatgaacagcttctgcagtttctctaagttgaatcttgagattcatgttctcctttttcaagaattttgcttccctttctctctccaccctcaatgcagaaagctcagcagcaagagatttggcaaagcgagcatgtcccctttttccagcctttgccgctgctttcttcacctctgctatgccttccattatagcattgtgctttgcagccaaatcattatatttttcttggaggtcggcatagtgttccaccattctaccatgtccgagaaccgctctttttagtgcatcgtctaactcttcagtgcacttcttctctaaactcagttccatctctaccctctctgccctctgacgaatggactcaagatcaactcttagttcatccgtaagacaaatccactcactttccatttctgtccatctctccctctctttctctagctcatctccaccattatcaagagaaaatacaccacttttttggagttgaatggatcttgacattaatgataaggatgatcttagtttgtcggtggactttttaactggtgcatcactacataattgcatcctgcttcttagattctgaatctccttaagaagttcttccttctcagctgcatcgaaagagctgtctctttgatttacgtcttcctggacttctttaatttcacaattttcctctataatacctggtaaatgcctgtctaaggaagttccccttggaagctgcaaacaacataaaaggtacgttaaaagggcgagttccaaacattccaatggataggactttatattgttaaattacaaaaccaacagttgaccttgtcttcatctttcaatgagttatactcttcttcatccctagtcagtttattgctttctggatcatacacaatgatggaagattttacttccatttctcctttcaatttctccacctggacaaaccaaactaaattgtcagtaatgtaaaattcacaccacagataattcacgagggcatgactccttataccaattgatttagttcttcaattctagcagcttgcttcttgcaaactttctctagttccttttctctcgagattgctttatccattatactctgtaaatcctttaagcataaaaaacaaagataaatcagttttacaagaaaattaatcacagaactttctggaaatcgtctataagacatacttttggaaccttatctgtcagtccatccggattctctgcttcagctgtttcaactcttgactttatgctatcttgaacctcagtagaatcctgatcgtatattcttttaaggcaagattcgcaaagcaagctagcagttctttcatcgacagaatatttcttctgttgcattatttgatcacaagaatcatccttgtcttctggacaaggtgtcaaggttaagcactcaaaagagaaggaagttgaagatttgtttaatgctgagtttcgctggtgataatcaattatctgcaatcccctctgtaggcttgctgccaaggagtcggtaggaccttgaaaaaccttgctggaacgtagtgacgatcgcatctgctcaccctctttaaatgattgccttaatatatcattactggaactcatattctcctctgccacattgttccaacttccaagacaacttggtgaataagccacacttttcctctggacattcttgatttttggagactcagacaactgtggttctccaagtattggagaccgactacatgagctaactgaaatgctatctctgaatgtagatttaattgtccttgaggcattagctgtgcatgcaaagtcatctgctgatgcatccaaggtggtagttgatccctcagtttcctcgggacatagcttactcattgcttctccataacatacttcctctttttcaatttcatcaccactggtcatatctgtgtcacaattttccgcaacagaataatactggacacaatcttcactgacagatatgtttttagggttctcttcacacgaatgatacaattcatcaatctgctggcgtaatttccttatgtcttcctcgtccacatttacctcttcatcagtgtcattatcaatgcagggtaggagtagagagcggtttaagctgactcgcaactgattaaggctgtcccgtacattgcgtacttggaggtttccatttttcctcccatctgagctatgaacttcagcctttgctctaataagttcttcctgcgccaaagcaaacacataattctgtgatgtcagatctgtatcaacccattaaaaactatgtcagtgaagtccttaagataaataataccttcagtttccggatttgatcacttaaatcattaacatcctcctcctttatttcattgataacaggttcatttctaatggttcttactcgctgtccaaacctgagagtgcgcagcgtttcaccattattcctacaatcaacaaatacaatctttaccactagaaacaaaatataagatgtctggcatacacatgaataggtaatgctcctcggtccaggtaaatacttgttatcaggggagatggaacagattaatgagagtttggcatttccaccgagtgattcttgtagtaaacgagttaaacaggaattcctgtttgaaatttcttctgctttttctgagtgagtttctttagtcagggcttctaccaagtgcctacagcagtgaaataaaatagtggttacaaagaagtaaaataaggacgggataacttcacccattaaataaataaataagaccaagatattgctttcaaccaacactagatgcggtcctgtgcattttgctcggaagagacaaaaaaatgcaataaacggttaaaatcacaaataacaaataaaaaatagtaaatggcatgaggcaggaatggaaatcaagagaagccacgtatgtgttgccaggacaattttaataaatatttggataactgaaaaactaccaactttagacatttgtatctagtcatgacatggcatcttacccaagctgagataaggacttctttacattcttgtcttcctttagacattgcttgcctgcatcctcaactttgtttctgtcctgtccagcaagatcaataaggctaattctgctagattttgaactactgaaaccatttgatgatattccctgcagcaccagtcaaaaaaaaccagaagtagcgattaactaagagaaaattaacaatataaatctgtgtcaatcttaaataagaaaaaaaaaaaaaaaagatgttagtcttccatagctagtcactttaaatacaattatagtgggcaataccttacaccaagattcaatcacaaaagtgaaaattatatgtgatctagagctcttagaatttaagcttgttgttccaacttttctgcttgaaaggccctgcagcatataaagaccaaattagctaagctgataaagtataaatagtatgtagacatataatattcaacaatatattatatttcctttgatgcttccgtagtccctaccttaatcagaatttgtgttacatcatcatagctagtgacatattcctcggtcagattctctatatacaatgcatttttggaatcatctttcatctgcaataatttagaccagccataataagcatgcagcaatcgaaaactagtgtattagtcttttatgataaattgtagcacaaaaggatggcatatgcgtgcctcaaggttccgctgggttggatcaagtaaatccccaatttgttcgttgtatatctgtttcaaacaacaaatgaaaaagaaacaagatcatcatcatacaaacaaggaagccaaaatgggaagttttataaagaattacctcaaggaaagaacatcgacattggtagttgaattgtttcccgtcagacacatgctgctcctaatatagtaattgaaaaataaaaataaaaaataatcaaaaacataatagaaaatagatttagtggttaaagcaggaagtaaaacgtactctctccagctcagaaaacaacatttggaagatccgaggaacaattcccttgtgacttttgggcgagggctcctcaaacatggcacttgggggaccccacattgtataagtttttccacttccagactagcaaagaattaaaagaaaaataaaaaaaatccccaacaattaattgtcgaacaagaatgccatttttttctctcactaaaaggttaaaataatatagcaaacatcaagaagtacctggccatatgacagaattgaagtgttgtaaccagctaaagcattcttaaccaaagggacaccaactgactgaaaaatatcttcctgaacaaacaacagcttatataaatcacacttatcttctcttaacagcatggaagcaaataaaatgaactattagttgcttcattcaccaaagcaagtgagcaagtcatataaatagtaagtatcataatcctatcagagaaaattatttaaagttaaaaaaatactagttgtttcatttataaaagcaagtcatataaatagtaagtaaattaccttaatcctatcatggaaaattattgaaagataaagaacataaatcacaaatagcacaatgaagtgaagttatttacctgattggtgttcgaatcaaaaactgaatcaaaggtaaattgcctatccccaacacacaatgtgtcagaagaaaccttcttaacagttcgatctccctctattccattgttattcgtaggtctgatccgtactacaacctgtttcagaaccatagtataagcaaataagcagcagaaattttttcacatacgtcatacctatcttcagactcacagataacaacttcaatgttcaaaaaaataagcccaaaaagagagaaaaattggcgattaccttgactgatgggtcggattcaagagggaatttcgattttttgaggttgttctgagaaattgaggttttggactgtgattgtttggttgtggaaggcaacgattgttcatggttgatctggatgttgggatcggtggggggagtgttctctgcatctgaatttgggattttagggtttgaaatggttttgtgtttggaagagagtgatctgggaagaaattttttgagggatgaggatgaaatggtgccagagaaacgagtctctgcagtttctaagttactgctttgtctcatggttatggtttcgctgagcaagcaaacaatttagcaatgaagctatacacagagagagagagagagagagagagagagagagagagagagagagagagagtgataaacacagaaagaatgagagttttggattcaaacgttgatagagtgaagacagagaagagaagcaagtttttgaattgaggaggtttagatgaccgttggaagaaggataatagccaatgaaattaccaaattatcctttcttctttcctaaagacaaataatggcttcaaacaaagaaaaaaaaaacatttaatttaaattgagcttttgttgtgactatgatttttatattcctatgtttttcttcttcttttttctctctggatattataagggtaaaacatctcaattatacaatttggctgcaattgaaagaagaattccgtaatattaatatttattaggacgagatgagaaagggccagatatgtcaggaaaattattactctaacctattcatgtaaagggtgtaagtatctaaataggtcaatattaaatctaccataaaaagaagattttgctgtatgtcataatgtgacaaacttatatttattttcttaaaaaatattcaataaaattattttatttttaattctaataaatataattaataattaaatgtaattaactaacattaatataacatatttatgctaataaattaattattcaatatattgatgttaataaattaattactaagcacattacaatatcaagaagaattaataacattgttatatgaaaaaaatcaatactgataaattagtgtttgattgataatattgatgtattgaatatacttaatttctaaatttattatatatctttttacaatccaaatttattataataaattacattaattatcactttaataatttaaaattaattcaatcaaataaaaaattgccattatatttattctacatgtgatttttttctctcttctatttttcagttttattcacattccaaagaaaaattatccataaaaattggtaggaatatataatcaatatttattctaattaaatatgtattttaaattctgaattgtaataacttttaaaaatctttattataataaattaaaatatcaattaagtaatataattatcaatttaatgtatagtatttgttaatattttaaatttaataaaaatataatgttatactacaaactttgtccacaatctagtatcctatactaaaaaaatacatatttaatattttaaattataatatttatattaacataaatttgagcaacacacgaatatgatatttaattaattttggtctcttccacactcacataattaaggcatttgcagataacatgagcttacaattcagactgtacatgtgatccctcttgacgcacttaactttaggtgaatgattttgtgatgactattgctccagttgccacattgagaccagcatgaaatgcaagcatgtaaagccagcttagccccttaagctttctagctttattcacacactcaactttaaacttaattataacaacagcatgcattactcttgtgctccctctattttcacacacacaactctacttagactttaatagataaaaactttaaattaaacgttttttttctgtggtgttttgggctggaaggaaaagttagtccaacttgaaattaaaactagtaaaattttttttactaagattatgagctagctcacataactgaatgttttatcattatgaacaatgatattttgctttttaaaacatttatttaacatttattattttctctgtctcttttcttatcatattatattatttataatatttatattttctctttttttatcactctcactatgtgtctactaccatattagttctcaaagtattattttcctactgttatatattagttttggatatccatttatcttttatccatgtaaaagatatgggagtagtttgattgaaaacgataatgggaaatgaacatatatgatttcaatttttcgataacagtgtcgagattttccaacactttttcagggtttaccttttatttggcacaatagcatcaatccacctgggcaattacgcaaaattatgtaactaaatgtacaaggcataactattttttcaactcacaagccaacatgattagtttggaattattgaaattaaaaagctcgagtttagtttccaccgtcaacaatttccttatgataagaatcatgtggttagcgccgaaattaatagcatatcttctgccattaagtgcatttttaaattttagttaagagaaaaagaggtttttttactcttaaaacaataatcttttttcttcttaattttatgcattagaatccataaaactagtttctaatatttatccaaatatatcctgaatgggataatctccttcaaatttttcatcacctcaaattttttatttttatatgtgagaatcaaaaataaatatcaaaagttttataataatttatatatcatgttcaattaattgaattagaattcattgatacaaatcttttgtcatctcaaaataccgaaaaagaaaagaaggaaatcagaggctcgtcctccatacatacatttcaattctatcacgagccaatagtaatcgtagtttaataattacgtaattagctttccagaagcttatatcatttttattgaaatggtacaactcactgttaataattgactatgccatttgttcttatatgcaatgcaacagcgaattgcaacaatcaaaagtctcacatggtacccacatgtccttcaaatccaaaaaattcaaagaagatattaaaatctattatattaatttagtatttatactagctttattggtcaataattttcattacggtgtctaatatctgaaagctttgtacgcaaattacggcatccatataccgactatatatgtgaaggatgaaaaaagggtatttgatgagcaaaagtagaaaggcacatgaaagcactccaatgcacatccttccttaccgatccaaaagagaaagtaaaaggggaagaaagagcatgcagattgtcacggatctcactcacttagttaaataaatatgtatgagttgttgtaaattttggtaatatctttaatttctattaataaaaaagaatatatagaaataataataataataatgataggggacttgggttgggattctttcacgacacgcgtcacatttacgaaattaagggaaaatattcaatcggtgaagggcacgagtagttaatagtagtgggtcacatcttattttagaactgaaaaatttataatggatgaaatatttgataaatttcaagagatattctacaataatagacgatatagtcctccgaaagatataattaactatgatagtttgacaaaaaattgataatttcttacaccaataaaattatactatattacattatccaactttagaagaagattaacatcacaagcatctaacttttaagagaagatgatccgactatttgggaaatcctcttttaaaaattagttgataaaatatatgtttggagtcatggttttttctctctcttttaaataaaaatgaagataatataatttattacacttatataagtatgataaataatattatatccattacaagttaggaagtgatagtatgatggaaaaaaagagaagaataagagataaagatagtgtggtcaaaataatgagatgttcaaatattattattttattataaatagaaaaatcaaattaatgacattttggcaaccacaccatagagaacattttctgaaatattatcaaccaactttaatataccttaatttatataaaaagaacatatttattgatataaaaaaaaaaaaaaaaaaaacagaactaacagttaaatacttcacccaacattccatattactcaataatgtgggactttgagacccgtaacacccagattccttatcaacacatcatggtttcagttgctatatatatgctattaagaatgctttatatattcatagatagtgctcaagataaattattgtaggagaaagaaagttcaacaagtaaatacgaaataagtaacaaactgacaaaacataatttctctgaaattgttttacaaaaacgtattcacgccatttaacttctcttccaaagacacaattgagtgttgttgaatagtgaactagtgacgcccctgttgtctacctccaagtcatttttcttttcttttaaggtgatacctctaagaagtcattttgagctgatgaacaaagcagaagaccccaccatgattaatctttgatttttacgtaaaactttggtgcaagagttgcaaaatacgtcggggaagcatatgccatgggacccacgaatgaagaaaaagggcaaatttctagaacaaaagtgcaaaagctcttctcataagtgggcgaccgatggtatcatgcgaggaaatctctcatgttctagactcacataacatcaatgcatttcctgcacaggattcctgcacaggatttttgatgatcaaatttgacttcatatttttcttcacataaaaaaatgacacagaaagagaaacaccaacaatgttaaattgctttatgggattatacatgaaaagaaagagggttaattgattatttcttgatatgtagttgtaactctataaacccaagactcgagtatacgtaattaaggtatttcagaataacatgaacctactggctgagcaacaatataatgagactgattgattgttcatgttcatcaaggtaaattctattataagggtcttcatctatatagccatcaaattcaaatcttactgagatgaagagtaggaaatctccctggcaaactcaggtcctgagtgctccgatcgagaacatgtgaaactttcaactacttgtcaactatacagtaagattcacttctcaactactcatatgtttcataaaaagtaactctttcaagtgagtcctactgtgtggtataccttgtcaacatgtgacacttctaaaattatttttagatacctagaataatattatttacttatttattttaaaataaaaaggttaagtgaatatccaagtgacaccaactagtctgtgatactatgtcagcatgtaacatttctaaattatttttaattcttcaaataatgttattttttaaaataaacattaagaacttaaaacaataatttcttaccaacgaggattgagtgcagcggaagagactcatcctcacaaactgacaaatcaaggttcgaatttatacttaaagagattattttttttattgtttgttagtgtctcaaacaaaattacctctaaaaatgatatttatgaagaaaaaaacaatgatttcacatttaggaaggatatatgaaggaaacaaaaaccaaaatcaaaatttactgtttttataaagatgaaaaacactaatttcatattttaaagggacacaaattaaataatttttttataatagctaaaattaatactaactcatttttataaggactggatataaccgaaattataacatgaattttttttgtaaaggatgaaaattaaactattatcttataaattattcttcataatcatgtgaaagcaacaaaaaagaaatatcatggacatatacatcaagatacataaatattttaagtactctctaattagagtttttgtttcttgagactctaagatatcccacaactacaagcttgaccttttggacaaattatagaattaatcttcgaatccaaacttaatcatatttaaaattctttgttctttctcatattttctctcataaactgaatgtatattatcaactaagttatattcattagttttgtaaaaaaaaaaaagaattatcttaaatactacatagttcaaacaaaattatctgtttataaaatatatatgtataattttaagaaaaaaaagattatacactaataagtaacaatgtaaaattatcattaaattacaatttataatttatgatcaatttattaaattttattaaattatcataaaaattatacaaatgataatttataatttgataacaattttttaagaattaaataataatataaaataattttatattatttatacatcaccaacatcaccattaaactttaatttgtttaaaaaaaacaataaaaaacactagaagaagggacagaaatgcactcactcaaagtcgtaggtgggggcagaaagagaagtgtggagcagaaaaagtacaaagaaaagtcataagcagcataccccacctccaactgcaaaatgcacacaactcccttctcattggtctgtctcagccattcgcgcggggctgccgcatccccttccatttccataccttatcctctctctctctctctatccccacacacaacaattgcaataaatgagtgccctctgtgtatgcacagcaccttattaattgctcatatatactctcaacatacatactccaaatacacacaacaaaatcatagaccaacacacaacactacagcacctctagatttttattttcttcactgttcacactatttcctcctttcctttcacattatcccttcccttttttaaacaagccatcttgcttttgttccttctcttctcatcaccaacacggtgtgtgtccttcattctggattagggccacaaacataacacattccgctttgactttggaggctaagggcctaaggcaggtatgttaaaccacaacaacttaatcatctctgtgtttttaatcaaagtctctcttctttttttgtttcctgtttctctctgaattcttgtatgtttctatttttactttaactgtttccctcccttggattccgctggtagtttttctgcatagagcagcagaaaaaaaagctagtagctttattagaatctcctcaaatctggcaataccctttattcttattgatagcttttaagttttagccggttctgggcatcttagtatttctctagaaagtgaaaagtttcaattttgaagctgaggttctggttcctgggaattcgtttcactctatttgggttttgtggaccttgatcctcaattccgtgtttctctgctcttagctataaagttaaggtatgaactggggttgttgtttctgaattgccttccttcctgttagttgacaactcacgtgacagcccttaggagaaattcagattgaagcttcccacttctctttcacatttggggattgagtgttgcctttcctttttcttcctttttctatttttttgtacttcacaattcacatactagaaactttctatctgttttggatgtgcttaatccttcctgggctgcaaattgtaaggaagtattttcaagctgagttttagcagttttggtcttggaatagtgaattttgagttcttcctgttccttgttcctgtttgaagtttgggtttaagttcaaaaaatcatttgtgatgttggtttgaagcttagcttaacatagagtgacttgaatttgttgaaggtttttttgctttgtcaggttcccaatcactgtgatatcatggaatccccacaatctgttgtgtcaccattcaagagctctgtcttgggtgaagctgagaagtacaggtctgatgttttcacacaaagctcgggtcctttgtctaaggacattgaagtcaatggaagggaagctgccgaggttaatccggaggaatccatcggtgttgttgatgtttacattcatcaggccagggacattcataacatctgcatataccacaagcaagatgtttatgctaagatttgcttgactagtaatcctgagaatactgtctctaccaagactgtcaatggaggaggaaggaaccctgtcttcaatgagaatcttcgtctaagcgttaggactgttgattctgctgtcaaatgtgaaatttggatgctgagcagggtgaagaattatcttgaagatcagttgcttggttttgctttggtgcctttgtctgaagtactggtgaaggatggaaaacttgagaaagagttctctctttcttcaactgatttatttcattccccagctggttttgttaaattgtctcttgcttatatcggtgcttcacctgatgttatggctatttctgcaatgcctactgagttggccgcaaatggcaccgagaaggactcagaatcatgtgagtcactggccagagatttggacaaaattgaattcccagatccaaaaattgtaaatgaagaccactggatggtttcggaatactttggcattccatgtgaggagagccagtgttctgatagcttgaccactactgatactgaaaatcttagttctgaagcaggtgttcagattgtggagagcttctcagcatgcagtgttgaatctgtccaacctcctaaggctgattctccacccagcagtgtgttaacaaatggggtttcatctccttcagtggctgcaagctcagactcatctgatgttgctgcttccaagtctcccagtcaggaacaagtttcagccaccgaaaagaaaaatggggatgtcaaagacggtgggagtgactcctcaaatggggtgctgaatgagtcattcactaagcctgttgtgactgttaacatcgagccggagcctaatgtggtgcagcaggattttgtagacatgtacatgaaaagcatgcagcaattcaccgagtcactggcgaaaatgaagcttcctatggactttgaaagtggaccaactagttcaggaaactctagctctgaacagaagatacagacaccaaagagcactaactcccgtgtgttttatggcagcagggctttcttctgaacttttggttacctttggatcaagggaatactttcaggtgacataggatttagaatgaaaactgatgtcagtagtgaaatgaaataatgcactgtccagtgggattctcgcttctgtacttgttgatctgttataggtaacagggaatcttaactttgtattctcacaggcttggtcctatcttaactgctacatgaacttttttctgtcttgatcttattttcttgtgtttctttttgttttggatgtcaatattttgtgaaagcgattttcatctggcaaaagtttcatgctgtggataatcacgagtggtactaacatggtccccacgttcacatggcgaatactaaagttgatggaggtaccaaatcatctatgattttgatttcttctatttcacacgaacaagagtaccgtacagcatcatggatatgcttttctttttctttttcgtgatttgggccttaagcctacattcttttatccaaattaaacaactttggatatttggaatgatgctgttttgttacgaaaatgaaatactcctaaaatttgaggttttgtactcaattttggatttttggaataatggtgttttgttaacgaaaatgaaattctcctaaaatttgaggtattgtactcaatgaaaattaaactattttctttatatacaactatcttaaattgttatatacgatatggatcctcgagttcacaagtgaactacatctgattcagtttaaatccaatgactttcactagcaacacatttaaaaacacacggtgctgacaagtgacagaaaagttttggaaagacactcacggtgcgaaacaaacatcatccgctggatatgaatttttaaatttaacatcagtggttaaaatagtgatgaactacggtggaaatccctacaccggataaaattaaaagtattattttcttaataatttgagggattttgatactgtgaattttttaatcaataaaattatgtcatctttttaattaaaccctattttttaaattactttcaatgctctttataaaaccttaaaccccaaaagattttttataaaaaaaagtgttgaaaggaaactaaaaaaaattagaattcatactactaaaattatttttaatcatatttttaatttaaaaattgaaaattaaaaaaaaataaggactaatttgaaaagaaaaaaaaaataactaatgaaaaaataacatgtaataatattggttaaaaattaagactgtcaaaaccctaaaattatgcaggtcagcatagaaattatttttttatttttctttctcgatatgtccttctcccttcatagtatccaaccatccctccctctctgacaccaccccgtagtcgccactgctccgcatcgacggtgtcaacagagaacaaaatgaaaacgattaatgtcctccttagatctgaaatccgacctaccccgtcgtaaaacccaccgtcacaacaccgtgaaccaccacgaatcccccacctcagcggcagccgcaactcctccacctacaaattcatcccaaaaaacgcatctttttttttttttttaaacttgcctacaaccccaacgatgaggaaacgattctccccaaaacccaaattaaaccacacataacaaaaacccattctagttgaatcctgaaccaaccaccaccgcacaaccacggcgaattgatctcgcgagttgtagtgcgggagagggagagagagagagagagagagagaaagttgaggtttgaaggtgtcgagagcatcgacgaagatgtgagcggagattggaagttgttgagattggaaaagggaaacagtgatcatggtggaggtgaacggcatgagtgcaactgtgcaagagaagaagggtatgatcgaaaaaatatattatttcattctggcagtgtgcatatccctttggggtatcttaaaaactatggtgtgatggcaagatgcttgtagtttgaaaagtagttgcagagtatcttaatttcttgtaaatataattggtagtaaccaagccaacccgtgcattgtagggtaatgcaaagctagccaactagttatagttataagctaaaattgtaatttggacaaggcaccgttccttgaaaaaggaagcttctgttcattttgtaattctgatgtggaaacgcatgatcgtttattttttcagtgcagattttctttgtatttggtcagcagttcgggattggatcagatttcctagaagaaatatttcattgcaggcactttgaatagcttaatccatcagcatgctacttccgatcactttgggaagatgaggtgcttggctctggcattcacagtttattgtatttggatgacaagaaactgtattcttttttatggtcaaactttaaatattgttgatgttattgagaaaattaaatttcatgtgcttaagatggttcatttgttatacttgtattagcaaatttgtgtttgtatagaagttagttggctaactctaactattatttatttgcttcttttggcaaatgtaacagaactcatatttttccaaaaaaaaaaaagtcgttttcccaacttggtattctcgaaaatacgcaatgaatatgtaaaacaaagccctccatagaaaagaaagtggtaaaacataggacaaaagtaatgccaaaacagaagacctaaaaaaagtaagtaaaagtatgaggaaaccatgattattttagaatataatttactgatcacatctatcttctactcttccattttttttatttaaattaataaattttaaaatataccttttataactgtttaataaaaaaattaaaaaataattttatatttttatgcaatttttctttggctttaaaatattttttattttaaaaaaatatttgatttagcaaaagaaaaaattatagttatttaaactttaccctcatctcttatcatctttaatacataaaataagagattattaattaatgaaatgagaatattttaataaagaataatttaatgttttaaaaaatgttttcatacagatcaaataatgatttgtaaacatcaatttctattttcaaattatgaaaatcggcataaaatgtgtatgaaaatatatctatggaagaaatgaatctcttaaataaatattattactttgaaaaattagtgtttgactttaagccgagtgatatgttatggttaacaatatgtagttttttatcactactcctattataatttatatgtttacaaaaattttctaacattttaatatccttcatcgcgttaaatatgactcgttcgtcaataaaacaattctatttgtaagctgtgggacaaattgttactcctgtcacaactttacagagtctcgtatatcaagtaaaaggtggatgaacttttagcagaagttgtaaacttgttgtaacatctcatttgtggcatcaattatgataccatatatttgattgtttgcaattctaaaggtcctaccacaaagattcaaccagcctaagcctatatggactgtgatgtgagcattggtatgatcacaaaacttaaacaaacacacacggcatgaccccaatcccataaggaaaaacatttgctggcaaagaccgacccaaacagaaaagcttactagaatgcctctccgtgaacaacccaatgtagagtataaaaatgttgcttgttttgactgcggacactataaggttatgggcttatggcaactctataaccaagctgattcgataagaataattaattgatgaacagacagtgtaaataatttttacattgttatttgattgatgtccatttttacattgttagctgattcaaaataaggttatagcaattataccaaaattttggttgacatttttcaattcttaaaccacgtttaatacaagagcaatttttttatgtgcaagaattatgatttctgaagattatgaatcttaggaattatattttttggaaatgaataaaatttgtttgattgattattggaatcttaaataagttttttaaaaatcaaagagttatacaatattttcactaaattaaatattttcactaaattaaataatttgataaagagtaagatgatatttttaatgtattaaaagacaaattacttgtgaaaattaagattttcacctttttcattgatttttttatatggaaaattgatttacaaatatccttttaaagaaatattatttttaaaaaatatatcaaacatggaaaactaagtttttcaacctataattctcataaaatcaaaaaatattcccctaccaaagtcctcctacagttagtttaggaaaaaaatgggaaggatgaaagagaaacaccaatttttttattattttctttgtttggagcacttcaaaaaagagaaagaaggaataaaaagcatgagctcacacgcactaataattcttccaaatgtgaaaagaaagggaaaggaaagtttatttaaacagacttaaatacccctttttttttctatattctttttcatcttcaaaatagaaggaaagaacctagtacctacacacttcaataatgcctccgaatttgaagagaaaggggaaggaattcttgcttaaataactacaacactggacctgtgctttgcaaggtcaatggaaaactaattaataaaaaaattgcaatttgcaaagagataaatagaaaaaaaaatgtaaaaattggcacaaaatggtgacacgtgtctaatttttggatagttttatgtaattataaataaagattcaattactgttattgtatgtataattttttagtagatatatttacgtcatttttatattcatattttgtatttcatttttttctaaaaaatcaaacaagagaagaaaaatttgcaaagtcatctcaattttcactcttttcttttctttcacttttatttcctaagccaaacacaaacacacattttagtgcatataaattaaactaattcaataaataagttgaaagagacaaaccgatctaaatgcactgatttaaatttcattaatatacgatatataggaaattgcaaatatccattgaaattaattaaaagtattaatttaattagatataaaagctccaaaaatgttataaaatgaaaaaagaaatacacaagaatatgtcccgatgttagcctaaggcatattgcttttgaaaatagttatggtatcatatatttcaatatccccaacatccttatctatagagcctcaatttcattcatgcattgttttcccattcaaacttccaaggagttctgaaacgaaacattgttatcatccatgattttgtcattgccagtttgccacacgctattgtcttcaaattaataaagattccaccatatgtctacaaccacaaccttcaacataattgaggcatgtgcatttatatggatttgcatgtgacaatcgtctaaaatctccaacacaggcttgcatggcttagaataatgatattctacccaagtattgtactaataattgtgcacatccaagttaatataagctgtttaatagctaagactatggatatatatatagttatatacaattttgtgtgtcctctgtggggagagagagagagagagaggaccacattgtaatggggggttttcaggggaaaactgaaagtgatacaagacaaatcatgatccatataaggataagagttagcatgaccacacacaaattctatcttaagatccaaattggaattgtaagaaacaaccaaaaaactaaaaaagttactatttagtatttactattgacaaacataagctaccaaaaaaaattgaaccatgctcccttattttaaccaatcaattttggtccataaaaagatgctatagcatgctcgatattttcaccacaaagttacaacaaccaaacaggagagaaagcaactattatgaatagagtcgtaatatcagcaggaaccaaattttgaatgtaacaataaaccaaagtataaagttgtataacaaaagtctaacaaaaaataatatctgtccagtaactaattatttgatgggggatccaagatgggtacccctctaatgtatcaaacctgataaatcaaacagaacttcacttacaatttgatcagaaacatgtcccatgaaaaagatggtgacaagaacaaacagctttgccaagcattacagtggcaaaaaaaaaaaaaatcaaaaattaataaactatcattaagcatattaacgatgatggtgcatccctccagcaatgcacaattaaactactggaaccaatcttcctgagtatatcccgcaatctgatgttacacctcaatcaaattccaagaaaggaacctagccttgaaaaataaagacaacgaaaatcccaaaccttacacaaaaacacttgtgactgatttagcttccgtatgatttcacctttaatcagtttcccttgatctactgttaccataacatatccaattaacatatctcctaagcagcaattcctgaaacaagtagacatgcaacaaaagaaaatgagtatacaatgaagttgaaccagaacaggtaaaaaaacgtaatggaaatactcaaatgccaaccctttcacaacaatataatacaagaaagtataatcaaacctcatttttcactaacgaatcaaaggggtgtaatctatgtctatattctgttttacagtttgaagctctcaaatcctaattattgagaaaataatcatactcaattaacaagagtgagtaatctatgcctacatctctagcatcttgcaagttagtataacttcacatgaaacatcaaatttgaatatctttaaatgaaagtaatcaagaaactcaggcattattacagcaagctaagggcatacttggtttgagaatatttcttcttttttttttttcttttttttttcactaataattaaaaaaatgtcactttgttttttactttattcctgttttcaaagatttgcacaagaaatggtgaaaacatttattttatagaaaatataacttctcagtggttttcactatttcctatataaatctttgaaaacataaagtaaaaattaagtgatattttagtaattacatgcgaaaataagaaatgagaacataaaatgttttctcaaacaaaccacagaggccctaataaattaagtgatattttagtaattacttttagactgtagtaagaatttacaatgacaacatcaagaataaaggaataaaggaaacatgtcaataaagtcaggaacctagggtgtttgggataatcaaaagacatgaataatgcttccatgttatgtttatctatattcacaattctaacatgatgatcataagcttaaagacaaatgtaatagcacattaaaaaataaacagacttagttttcaactttcttcagtaatattcctattctgaaacatagaaagtccaaaacacacaattggttttatgaaaaaatggaataaacaacagacaatgtataaactatgatctaattttctacatgagacaagcatgtagtcaaagatcttacctctattagtttgtctacttattacattgtagtttccaataaaaccctcagaactctttactggatcatctgaagctataccaccaagtccaccataaccaaacgaaccagaagcatctatctcagaagcagcagaccgccaagttgagtcaccataaactgaaccattgcggtacaaatccccataggatccttcataatcaccagttggtgcagtaaatgttgaggattgaggcacacttgggctgctgttccttccataccctccacctcctaaactgatgctgttatctccaccttcataagagttaccccaagtactatacccagtggcagcccctccaccctgggttggaactgatggaccccaattggtgccaccatttccaattgaaacaccaaaagccccacttccagatcccaagtaagcgccagggctgactggactattggcagcattgttcaggcccccatttccccaaacactccgggaagctgagttcataagagaatcgcttctcccattgcccccgctattgccaataggagtggtatatctgttagagttgccattgttgaaaggactcatccgagcgtatccaagactgccaccataactggaagtccctccatagcttgggttcaatcctaaatccaaattcactcccattccataaccactggagccaaatggggtaaacccacttctggcactagtaagtggactaaaccttccatccatcctgactccataacctccaattggattcatattgaaaccctgagcataactatttaggaagctactggtcctattcaaaccatagttatatcctatcaatgggcttcgggtaggtccaggggaaagctctttaggaactgccctcttgacctcaaccatcttcccattgagttcatgaaatgtcttataaagaactctgtccacagcttcttctgaatcataagtgatgaagccaaaacctcttggcctctgggtattgtgatcatacattacaacaacatcagtaattgtaccaaactgatcaaagtacttcttaaaatcactctctgtgattgttgatggtaaacctccaacaaaaatctttttggtgcgtccaggacttggagatccatggatgctaccagactgtctgtttatagtttgctgatcatccctaggaacagctttcttagcttcaacctgcaaattgacagcacaacacacacggatcaaatctgcaagtcattttcagcttcctgtcctataagaaaatataaaagtagggacacaatgatctctatcagaaacataaatttagctaggtcccatcactgcccatccaaataacatgtatattgaaataatgcttaacaaatctatgatgaaaaactcactgtgcggccatcaattatgtgcttatccataatgactctctctgcagctgaaggatcagcaaagacaacaaaaccgaaaccgcgagcacggcctgttgtccgatctctcatgatcacagcctctatcacctctccatatttcccaaaatattctttcagacgttcgtcatcggtgtcccaggaaattcccccaatgaagagcttgccaagatccgactccatctgttctgtcaccaaccatgcccagttaaccatcaatcactcatttcatcaaacaaatccaatccaaccattcttattgaatcaaaattctcatgccaaaccaaaaaacaatataacataaaaaaaattagaaattccaatacacaaaatctagattctatattattcagtgatgggcaaagttccagtcccagaaccaatctaaatgcatagctgattgaataatgcataattgagctaaatcaccagaaagattcaatttttcatgagcaaaaacaaagcaaagcgatcagaaatgcagattagataaatctgtgaagaagggtcaccttatgttgaatctcagacagaacccagttggtgcttcaatcagatacgaagtgggttatgccaaattcgatctaagagaatcggatctttggagcatcaataaaaaaaactgaaccaaaatatctaatccagcaaagagagaaaaccaagcagctatgttttttttataaaaaaaaaaatgttcttaatgttttttttagtttgtttttttgtttcttttctgggatcagagaagaagaaattgagagaaggcgaagagatcaaaggaaaaagagaggaacccagatggggaattcaccatccaaagatgaatggttggtgatggaaacaaaagaaactaataataaaaaataaataatgagaggtcatgtgaaaatttgaatggcagggaaaactaagaatgagaatgaaaacagaggatgtggtgtcatcctctctctctcctgttttgctttcttatcttgttgcttgcttcaactaggtactcttaattaaatcaaaagaaatggaatttgaagcaaagatgggcaaaacacagttcactatttatatataaatagatatattttaagagagaaagagagagagacagacagacacacactgcaaatcgtgcaagaatatttggaggagccagcaaatgacaacagatcatggtatttttaaaattaaataaattcaactatatataaagggaaaatgtaaatcacctaattacttatttcttttaaataaataatatgaattttcgtaaaataaattaatgtgaatatatatagatgcagtggagttgttgaacaaattgtttgttatagtaattattaatttgatatattttatattttatatagatataaggtagcaaatccaacctaaaaagaaaaaggtaacaagaaaaaaataggaagaatacatgtaccatttaagtgaataattaattaaaaggaaaaacattaatttgacattttttttttgctgaatggacattaatttgacatgtgttacagaaggaaagagaaaaatatacacaaaaaatatctgactttaaaaatgaaaatgtaaatttattatataggatcaaatttgattagatattttattactatcctctctgtataaattatatatatatttaagaaaactaatttatgctttccattacttggcatcatgttccaaagaggaaattcaattggagatgcttttcatctaacagctcgcaaaatgcaaaaccgttctggaaataacgaatgaaatgatgatatttgtttcaaagaatttggactaatatttacttcaaaatgcatattgaagtagtagtcttactctcgaggaacaattaatatttgtaggtgatttagctcatattatttggtacaaaatcgtcttttttagattttgcataacttttttttttgtaaaagtgaaaaaaatataatttattaattgttttggatatggaatggtatatgcatacttaggagaagaggaggaggaggaggaggaggaggaggaggaggaggaggaggaggaggaaggggagaggaggaggggggggggggggggggaatcatcggattggaaataggaaacgccatagcaataagaatatgttacgtgacacttcaaattattttacgtattgattacacacagagataaaaacgttttaaattgttataaaaaaaaacgttttaaatttatgatagtaagcatttttcatccttaaaatttgtgttcagctttaatatccttacccatccatgatcatgatgttaatacaaataatgatatcttaagattttgttcttgtaattttttttatattatgatattgagttattattatcatttttaatggaattttttctttcaattacgtttttaatctccacaagatccaaactcaaaattttatttaagaaaaagagtctaaaattgttcacaccaactacttttcatgctttggattcaaaatgagctttaaatgttgcagattattacaacgttttaaagatagagtaacaaaagaattaaaatgttaggttattgtgggagtagatggagcatcaacttttttgtttattttatttaaaatttgattgagagttttgatggggtaacaactgaaagtgcagctcaaaccgacgggtaattcctataaacaaaggaaaaaccaacaacaaatgtctaataactattattattattatgcaatgctacgtgaacactcaacgttgagttacaccaagttgacatatgaaggaaaacaagaacacggaaagactggttggtaacatatttttccacattcctatgatcagttggttcctcctatggacaccttgaaagctactctaaaatgcttaggcagagatcgcaatatttgaagctgaatctggagtaaccccttaccttgggttttttccaaaacaaacccatcataacgtactacgtaatcataacgcattgacctcatttttctttttcttatttttaaaagcttatataagaaatattgaagaagaaaaaataaagtataatactttatgagtagaaatgaaaataaaaaataaaacatttttttaaaaccaaataatcgtaattttcttctctaaaggcctttctattcccagttggatttcttttactgcagtatgagcccactaggcggcacagttcctacacgctagaacattcaagtgtatggaaaaaagaaaaaaaaaaaaaaaaaaaaacccttaaagtgttgaaaaaacgtaagcacatttaagcggtgaatcaacactgcgaagaccaataaatagcagagggaaacccaagtttgaccttaggatttggaagcctttgatgctactcaacttagacctcagctgttgagacgctctttttttggactttttcatagtaagatgttattttccttgagctttcttttctaaacactctctacattttacacaaccttcaaatttcatatttttgttggcaagttatttttcagaagtttggtatcataaagtcatcatgttcatataataataataataataataataataataataaaacttttactcggatcaacttcatagtaacaggtttagataatttacatgaggtttcgttctagatttaaactccattgtcactattataaaaagtaaataaaatttctcacataaatatttcatattaaaaattaaactttttggtaatcgggatataataggatatagttatacatgaaaattaataataaaacttctcacacaaatatttatgccaaaaaaaaatatatatggaatttcatattatttttcccttaagttttccaatttgcttttgttttgattgacgaggtaagacaaatagggatttatatggattggacatgccaaatagataaacctgttagagcaaattgattaaaagcctctaataagctaatctgaagttaaaatatttagaaggggaaatatataacagagatcgaattcctgtactcagaatttatgtttcacaatttcacttgaactgactcaaggagacataataattattcttcgattaactatttcattgctttatcttttttgtagcagtaattatcatccgcacacgctcattgcttttgaaaaatcaacccaaacgagtttcaaacgcatgacatgcttatcattattcatctgttcaggtgggtaaaaattcaagtaaaacccacaaatccaggtagcttcagtagggcttccaccatgccacactcttttgttttgggataaataaaaaataaaaagttattagcattttagcatatattaagagttaggtaacatcattgtattctacagatatgttattgaaatttcagatggaatgtacatgattcttttccttgtcctttcatgataaacaagttcaatttttttggtctttaactctgtttcatcaagagaaataaattgtgactaatttgaagtatattttagaagataagtaaagtttgacaaatgatcaaatttggatattatttaaacaattcaactttaatttcagcacattaatcatttgattaaacaaattcaattttgagtacacttatttcaacacctgtctgcttttgcttgttgtctatataatcaacaacttgaagcatatatagctacatttatatagcaaaatatagttaaaaaattcataattaacaaaatattaaaataacatgtatcaaatcaagttcaaaagcatagttccagaatacaggattaattcctttataacaaaccgatgactacaaagtatcacatgtttttctactagataatgcccatagtttctaagtcatgtgggactaaattagaaaagctctcacacaggaatcactatgatatataaataggtgaatacatgttattatagggagcatgaagataaatcaataatttgatcctggagaatcccacgtttcaggtatgattttgtgaagtgaacaacactcatcgtggttggatccaatggaacagcatttggaagcacaacgttcgtgatgttgttcatgttgatccatgacctcctcaatcttctccaaaatctccatagtggttggcctattttcttggaaacgtgacacacacaagagggctatattgagaagaggaaatgcccattgatgatcattttccctaacctctttgtcaaatacctctcctgtccattcctcccttaccatggaccttacccatctagcaaggtctattctactcacctctgtgctttttcctgttagtagttccaagagaatcactccaaagctatacacatcacccttttctgttaggctcttttcaggagctgtgtatccctgagaggaaaacaagaaacctctatttgggtccatgaattttgataagccatgctcacttattagtggctcactgttctcatcaagaaggatgtttgatggcttgagatttccatgaggaatgacctcctcctctccatccaacttcctatatatgaaggccaaaccccttgcaatcccacatgctatattcaaacgcattttccatgggaaatcttttctacctgctatataatctgcataaaaaaaaaaaatcaattacttttagttttgatacattggtggtgtgtttatgctatcaaccaattagaaataagactcttattacaaaagtcatcaacaatcttattatacatgacaattcatgattggatggcaatgtaaaaactcttcacactatctgtaattctgtatattctaaagtcattcctacttataattaagtgtcaaataacttttatatcatgatatattaaatgtttcacttttgataaaaaaaaatcactttgtttttttaatcacttattagcatttgccgtatattaatgtactaatgtggggtttcagctagattgttcaaatgatcaaggcagaaacataattactcgtgcagcacaagttagggaacaaatagagaagatgatatggagtgttgcagctgatgaaaaacaaattaatcttaacttaccgtttaacagattaagcaggcttccattgctttgatatttgtaaatgatgagtttttcttcactggtagaacgataaccaacaagggggagaatattctgatgcttcaagttacttatcttccttaatgtttcaccaaattcttccaaggatacctgcaaattcttcaatcttttgactgcatagtgaacattgtgttccaatttcaccttgtaaaggctgctgcaaaagccttcactcctcaagtcagcggtggctcgaagaaggtcctcgagtgtgaacctttcacgatcttcaacaaagaaaacaagctcagaatctccttcctttagcttcacctcgtgaacttcatgagttgtagcctttgttattggagacaaacgacgatggtctttaactacctctctctctgcacttaattttcctgacttctttacaataaagtaaatggttgacaaaagcaatccagcacccaaaagtatcacccccaaggtttctggccgtggattcttgccattattaggtgtgctgtcgcttaaaggacctggcgttgcttgctgtattgtgtttgtgtcactttcctttagccactctttggtactattgctttccaacttgttacttggagtcacataataactaaggaggtgaatataatgttgtttactagggatcgtaccagaaaagttgttattggaaatgtctaagttcctaagatgtttcaattttgttaaggcatttggcaacctcccactcaattggttgccggttacatttaaatgtgtcaaccttgtacaacgcaaaattgagtgtggtatggttcctctaatgttgttgttagccaagcttaccactcttaacttttggagcctgcatagggaatctgcatcgattgtgccactaaggttcaagttctcaagccttatatgtacaatattggtagcatttaagttgcatcttacaccattcaacttgaccaagcatggatgggatggtgactcaatccaggtaatgttaagcacgtttttgggatcaagggcccttatgaaattgaagaaagactcagattctgatgaatcacctcttgtacattctactataaagaaaataaggatagcaaaggaaactagcctccttagaaacacagcaaaatctcttgtgttctgcatttttttttgtggtcaccccctccaattggctttctcctctgtagctaagggtttcgcgagagaatcatgttagtcctgcaatcttctttatttgtgcattggataaagacatgtctcttcttagaagttttcgctaggtacgtgtaatacttgtttttagtggtacatcgttaatatctacatgcaatataaaattacacgttgttccaaaattgatgaatggtatgtatatcgggattgacaacataattgcaaggtatcagtataactcttgtcatgaagcatctatcctactataaactaaggaagtgtttgtacaagggatttcaaaattttacagcgtgtgtagataggagttttgatcctctgttctccaactaaaatattcaccttttcttttcagtacctaccccatatatatatataagtataaaaaataaattttaccgttatgttcgaaacgctatttcggttagttttctattttttttttattagcttgaaaaaatatatctctttttttctctaattctggataattattagtattattacttttattaagtattattagaaataaggatatcatgaattttatttattaaaatgagattttttttttgtaagttttttcatgttgggttgaggttgaaaaccttatttaaccttgttagtagtatattgtaatgtttttttgagatactacttctagtaatcatttgtgaaactttagctttttatttcctatattttactcatcttatgttttttaagtatttattaaatttcccttttattctttttaatgtaaggtaagatttcatttttttcttcttctttcacctgtaatgtatggttatttttttcttacagctttcaggttattgtgagcgagcagaaattgcacgatagtggttagagagaagggatctcacgagaatttgggaaagttgataaaataaaataaaaagataaagctagtaaaatcacagccttttatttaaaatataataaatccaatggtgataaaaaggtttgtcacacgtcatcgtctaggatcataattgactaattgtgcaatttaagtttcttaaattttaattgaattttctaacattgtaattgtacaattttagtttttttttaatagaacaacatcattcttattaatatatatacacacacgcttgggggtaaagaaaaaataaatatactttgaggattaaaatcaaatatttgcaatacatgaggaattcgatattaattgacacatttaaaatctgaaaaattaaaattgatattgtacaattatgatacttgagggatcaaaagtccaactaatccttaatactaaaaaatgcacaaattgatataaatgttacaaggccaatttttatttgcctatctattcaaatcatcattattgttttctgacaaataatatcgtaactagattagagtttattatcaagatactgacaatgtaaaatattattcaatcacaaattataattagatacctataataaaacttttatactattaatatataacacttttttcattagtttaacacttttcgttacaatttgtactgaggtttctttggtaacaaaaatagcaatgctcttatatatatatatatatatatatatatatatatatatatatatatatataagagttaataaaaatggatctggagaacatgattctaaaccaaacatattaaaaacattaaccgtgctgaaagctgttatagatgtgatgtgagcaccaaaacgttaatatattatttttttattttgacaatatatatatatatatatatatatatatatattcatttaacacataagaatgaataattttaattaatttatttgagtaataatatgggtgaatgttggacgacatcgattataggtgtgccggctaggatttgtaaagaaaagaaaaaaagaaaattgagagtgtttatagacattatgagtgccttgatacataggtgattttcactctattattttttgttttcccttttttatcttaacccttatcaattatcatcatatcctgcatgtcttataggtaaacgcaataaatgacgcagaaaggggggaaaacagaactcttgtttgggagaaaagagactagacacagtaaataaaggaaaggaaaataatagaagacagagtacattaaaccacttttttttaactcttatatttgttgtgggggactgtggtcatgagtatgcggctgagtcattgcataagaaagaattagtgagtagcccgttaaattgcataactagagattatggaagtgagtattatttgtcataagccaagtgaaatatatatcttatctcatgtgtacacttccctggaactctgcttgcataccaaaaagttcagtaccttctacttctaacaattggttaatataaaattcgttaatttttcggaagatttaacttagtcgattgaatatagtgtatgagttattataaatcttctgatattatctttgattgaggatgagtcctgacataacggtaaagttatatcttactgatttattgatcatatgttcaaatccggaaacatatcccttcctcttaactgcgcataatgataaacctccgtacaatggagaaaagagaccagactaatcagaattcagccaaatttaagtaaaattcaacacattaaacaagttatttattttctaaatataaataattttgctacatatatcatcgaatggaaagtacaatttggttactaatctattaatttaaacatgttatgattatctattgtaagtacgatataatataaagttgttaaaataataattttatccatttttaaggtgatccaaatatgattaaaaaaaaggtgatccaaatattaaggttaatttacaaatcaattcaaatcttatcttctttataagttttcattatggatatttctaaatcaaatcaatataagtgaaagtaattaaattaattccaaatttaaatttaatactctgatcgcacttttaaatttaatataatttttgcaagaaaatcattcacaataaattagttcttaaaagcaactatttttttatcattaatgtcataaaatttaattaatgaactacataatgcaatctgttttgaaatagtgtattttttttttatatatttgtattgcctaaattggtttacattaaaacaaaaaaaaaaaaatcttattttttggcaaatagctgtcatggacctggttatatagataggagactaattgtagcattagcatgtgccgtgccttgaatatgttagattatacatgaacaactaattaataattgaaaataaacattcattgactttccacctctgcaaaaaatatttcctctatctaccttgacctgcatgatatgaagtactaatatatgagcgatattaccgcaatcgctgttataacatcaaacgtaacgaaattaaaatggaatatattcccctgccataattccattggcaaacttccattgaaattgcccctaaggttgtttaaccaccttgtacttgtctttatctccaatttgctcttgcagaagatgaatctgataagtgttattttcttttggcaatgatattattttattgttgttgaattatgtagtagttctttggcattcgtgaggaatttgcaaagtacaatgcttggattcgtaccctgcaaataaaagaatattgaaaacaataagaaaagtcaatgtcaaaattccttattggtttaaggagaaaaaagatgtggtacacccaacgggtcactacaataatttgattaatttcacaacaaaaatgagtggggttgcacgatacaagtctaagtaccctttagttcacacctacttctcttcatcattaagcttagccgttggaccaatttttaaaacatgaacaactcattttgcttgttgtgattattatatgtaagctggcctccaacatatatcaggctgcttaaactgcgttcaaacccttgacttcacttttctttgccctcaaatcaaacgataaaacccttttcattctgacattgtttttgattgcttccaatatctcatttccattattgaaggtggcaataaaaggaagcattcaaatattgaaataccatttttgatattcaaacattcttaaggatggtaaatttagggtttatttaaataaacttgtataaaaagattaataaatcttgtacactacaaaatgataaaataaaaagtacataaaggatttgattttcaaggatgaagagaatagtttttaaaatgtaattttatatttggatgaaatcgttaatacatatcctttagtttactagaatcacgtccttctaaaatgggacagttatatttttttatacaatttcctttctaagattacatctttagtactatttttatttttcaagatatagtatttattccatcacacatcccttgactgctgataacatctaatatactattttaacatatattgtcaaatcaaatcatcattcaatgtatgccgcacaactcatctgtaaaatttcctatgtacaaaaacaaaaggacaccaaccccaatcaagccctcccctggtaacccccatattcaaccaaaccttatccaatttcacaactagccaaatggaaaaaatatataaacaatttatgttcacagttctaggctgcccaaattgacattgcatactgaaaaggtaggtgaatcaaatttaaaaaaaaaaacacacacacacatatcaaatcaacactgtaagaaatattctattggtatgaacaagaacagtcatcattttcttcatcatcaacaatctcatcaaagaaaggatctctgagaagctcagctgcagaaggcctagcccttggccgagcaaggcacttctcaataaaggccttaacctcaggatctttgaccttgttcaaggcagcaggtctaactccagaagacaccttcttgtatattttagcaacattgtcacattcactataaggaatctccactgtcaccatctctaacacacacatcccaaatgagtatatgtccaccaattctgtgtagtcttcatcgtataactctggagccataaattctggtgtgccaagaatcgtgtgtgcacaatggttcttgcccacaattgctgccaaccccaagtcaccaatcttaacctgatatccatgaaaaaagatacaatcactaacaaaacctttatgttaattacatatataacaacagcataactaagattaaccttggttgtaatagtggctaaaggcaaacaagtttgaagtttctaaaccaaaaaaatgtttgataagaatagtttccaaaaatagtttaaaatcaaaatatcttagactattatggttttttactttcaattttccattattcgtgttgtttcttatgctatcccatcttcttgccctattatagttttaatgcatcacttatttcacctctcatattttttcatagtagaaatttataggcaaaaacagagcaaggaaaaaagtaagcaccaaattagtattctaaaaacaatgtaattgatcgtttttgtcaagcaaacaggagacatcatccatgacttgctcaagttaattacttagatctcacacagaaggcatcgagtcaaaggaaagttaagaaaaagaagaaaaaaaatccaactttttcttgcatttttggtagtttactttcaccttgataatcaatcaaacatatatgatatataactggacggaaaataagatttgaataaaatggttcacctggccagtattcccattgacaaacacattgctgcaattgagatctctgtggatgatgcagggatcatgcaagtgcaaataattcaaccctttcaaaatctgcttagaccacttctttagtgcctttatcgaaacatgcctatgcttcttcctgtactccctcaaattcccactggtgcaaacctcagtgatgaaattcaaagtgtttcgctgctcatccctccacacattgtaaagtgcaatgatgttcttgttggacaagcctctgagcaacctcacttcagagtaaagcctatccaacatggcaggatcatcacagaagttcctcagcttcacctggttccatgccacctctattccttcttcctgatcaaatgcacgatacactttcttcacagcaccacatccaagcaactcactgtatctaccatagcgaccagttggatcggtctcaacaaatggctcggaatctttgtcagggttaacactcggcatctatcacatgtaagaccaatcagatactcggcaaaatctaatcatatcaaatcaaattcagcatgccactaaattttgtggaagaaaaaggaaacaaacaacaacaataacaaaacaaccccattgaagtcttcagatgaaaattatcaaagaaaaatcaatcaaaaaataattttctgcaaccaagtctagccattaattcattgatttttattatatcacgttttcatgtcggtcaatcttctcttaccatgtgaacaagtttttcaattcactaaaaagagataataaaattcgattatgtgtgatatgaatattggctgaacttataaacatgtagtaatttcaaaccatacaataatttctcaccagatatttatataagtaaaacagaaaaacacacccagaatacttcaaatctggtgggctatgtgagttgtttaggagaagaatggtaaatgaatgaatataatgcatgaaagaataaggataagattgataaccatgaagagaaccgattgcttgacccccaagggagagaaaacaacacaattctgcagctttcggcagaaaagagaagctgactacgctccaacctcaaatcagacacagaaaatgaggagagaggtcagagacgtgtaaatgtgactatttataattataataaagatgcagtgttgaggagtaattaatgcaaactataaagtattgacggttttctttgatcattattttatcttttttcgaattcaactttttctatatcttttaaaattgtatagtaacaaatataaaaataatttgatattatcatctgaacaaaactcaccattcagttagttgatttttttaaaattattttaaaaattatatcaaccacaaaaaaaaaataacttgattcttttaaattgagattacgtattcaattcaaattttgtaaataaaaagaagtttgagtaggatttttttgaaatgagtttattttactcagcttgaattacttaaaatttaatatgacttttaaaaataaaagattagggagaaaaattaataaaaaaacaaattaattgattgtcttgtttaaccacactcatcagtgtcatgccatgactcattggagatgtatatgccattggattgagattctctcattttagtgaaattttccgacattgtgtctatatctctgctatgggtaaattccaataaatgaaagagaatttttttcctatgtcattataataacgtctagagaacaatttttgaattttctataatatctttgtattattctttctatttattaaacataaaaaaaagtattttaagatatcgaatatatttacttttatttgatactttctgtatcaaaaaatgtaaatgaagatttgttaataatattaaagccgaagtgccgaactaaggaaacgggtttgcaatttgcatcgtgttttttgggtgttgaggaaagtcaaataaaccgttgttttgtgggtcaacgcgtaaggctttgacggcagcgcgtgcggggcaaacaatgatggatgagcgtgttgaggtgcttctaatagctttccaggtaatggggaagaggttaccttccaagaaaagaaaactttagaaagaaataacaaaatcaggttgtggcttcagaatcacattctcttgctgttgacaggaatccaagtaaagagaactggagggaaaaagagttaacaattaaagtcagatatactatgtgcatgaaaaaagaaagaaaactgagagataaaagtgattatattatttgatatttaaacaatgtaagtagaaagaaaatatctatcaataagatataatagagttagtagataatttgattctttaaacatgttcatagagattgattctcaaatggtgcatatgaaaaaaaaaacatatcgggagagataaaattggatttttatgtttcgatgattagtctcatgattagtctcatgactttcgattataggaatatcttgtttgaggagaaaaaaaaagttaatcttattattagaacaaaacttgtgtttttaagaaaactttttctactataatgtttttaaaggatttttttaactttttttattaatttatcatttttatctttattttaaattaaattttaatatttttataaaattatcaatatataaaataacgtgtatgttagactatgtttaataaaatcagttgaaagtttatgagttataagttataaactgaaaagttgaaaattatttaaaaacttataagctaattaaaagtatttaataaaattaactgataaattgacttataaatatcaaatgatgtaaaaggatgtatttaatattttgaactttattacaaaaaatggtacaattaaattttaatttgtttttgaaaaagtaaaagtaaattaaaaaaactttattattattgattattatattgcttaaaacattttttaacatataaacaataatattaataacattattttaaaactgaagataaaaaaatattttttctttaagtagcatttcagttagtttttaattttttttactaattaaaaaatttatttctcggtaaataagttttttttagtagtttgactaaaaaaaatttcaaaatttaaggtttgactaagcatataaaaagtaatagtttgaagttaacaatagttcgtcaatgccacttgccctttcttccattttattacagtaaaatattattataaaagaatgaatcgcatttgatatagtaattgtatgatatagtttgaaaacaaataattcttataaataaagcaaataatgctttatatcagtcaaaccatatattattttgaagattttttctttaaatttttattcgtttggattattgcttccctaataatcttattaactctttttattattgaatgaaatcttatgtggctcaaataacaaagactaaacacaagtaatattatttcaaatatttataccaataagatattaaaattattggaaaacattgtacttcgactttatccatcccgtgcatggtgggattgtccaagatcatgtaaaatcattgcgggttctatgcatcttaattaccctgattaatgatttctactcctcaatttgatgaaatattttgaaaaggaattaaaataattaattggttgctggctttacaacaccattgaaaagaaattaaaaagattttaccaaactttgttgctgtgatttatgggagaagatatcttaaccaaaatattgtgatgtgcttcgcgtgaagatgactttaatttatttccaaaatatgtgaataactttcatttccaaaatcttccgtatggtttctcaacgtaagaataatgtgattcttttcattggaaattgtcctattttatggggaaatgctatttttagttagagttattaagtccgtgtagccctttcattcatccatgagttaattacttgtatcatatgaccatccctttcaacatgcatgaaaggccttgaatcaccaaaggtgccatttgccaacgaacgaaaagaaaagtggatcatcactttaagctcaatatttgatttccaataatgattacggtaaattggtaattgtatatttgtttcagtttattttaggggaacttttccccattaacttgttgagaacgttttcaaaaaatcggcaattatttcttaaaatttatactacaataattatatattaaccaaataatatacaattaatatccgtactggatcagggcatagcagcccaagcattatggcccaattcatatccgtactgttgttgtgacactagtgtttaggattgttggtgtttttagtccttgaaaaataggcatctttgagtgtctgattggataaatcataaacatttattggagaaaaaaaattaaaaaaaaaatgaaatgagacagagtttcaggttgaagtcccttaattttttgttatatttgaacagttaggagatgatattatggtgtaactgtgtgtttttgttttgttggtgtagcttgttaactgttgttgtaagctatgacactagtgtttagggttaatggtgtgtgaggatcatctttggttttagttccaggttgcaatcccttaattgaatttgattttttgctttatttgagctggtaggagatggatggtattgtgcatctgattattgtctacgatacttaatttgtgagtaaatttagagatctcacttttcttcttatttggagtcttgttaaactcaatttaatctagttttataaagttttaactttttagttggttgtcttattttgtagttatctttgtatttctaattcctttttgtagaaatagaggttgaagttggaaagaaaattaggagcaaaagcttgaaaaaatgtaaggaaatgcgttacagttactaagccataattttaggctaagctaaaattcagatagagaacaaaaggttcaagcctgactaagcaagaatcgatggctgagcaagagttttgttgtgttcatttgagatctatgtattctaactaaaccaaattttatgcctaagcgaaaattgttgccaaaaatgaaaagttttcttatgtatttaaagtggatgtttgtctaataaaggatggttcttcattttttttttcttttgtctagagacacgaagttcccactattcgtttggagataaatttttcccttggtccttttctccatttctcttccatctttcatgtattttggagctactcattgctataagtagctaagtttctccattgttaaaagtaggtaaaacattactcaaactctcttgtacatcttgataaatatatatatatataaaaagagatcaaattatatatgtgtaactttgacaatttttacatcatttttataatttgatatagaatgtgactttttttattcaatcgttaaattatatctacatattattaagattgtatatgtcaaaattaaacaacacaaaggggataatcaaattattcatattttagtatatttgaaatgtttatattaagtcaattttagtatatatgaatgaaataacaaatgattttgaattaatatgaaattttgcatatgtgatataagtgggaaaaaatttcaatcaaacaatgagttttaagaaaacattattcagttataagttatagaatgatgtaatagttatcaaagttacacttgtgtaatttttctctctctctctttcaatatatatatatatatatatatatatgtgtgtgtgtgtgtgtgtgtgtttgtgttcaatgttaatattttgtttctttgtttaatgcttgttgtggaatggtcaaccatgacataattttaggacatgattgttgttgaaaatgtcttcattctatagagctgaaacaaaatacccaatgaacttggtgtttaggaatgaagcttattcattattatcttgtgtcatttttcttaagttgttgagggatcaagacttaataaagaaattaagacttttttcatctaagggatcagagctacaaagatatttattgattgattttaacattgaaatacaaatggaatatgtattgtgcattaaagtgaaaagaaagtagagtttggtgaagtctaatcccgtcaatacctttgttaattgttaaatcttttattttcagttttgtttttattataaaaccacaaaaagatcattttaatcttatttatgcacttattttgttttaatctttataaaattaactaaagttagtgtttttactgttttttgtgatatttgtgatcttatgttgatatttacatgaaaattactaatattatacaaatatttagagaaacgatatttatgtttttgttttttgttgtacttatagtttcttaactgttgttgttgctacaatagtgtttaaggttaatggcgtttttatttcctaaaacaatggatctttggttttaggcccagacttttaagatcttcgtgcctatgtttagccaatatccaaactttatcccctaataccataatttaactttcttttgtctctcacaaggtccattgcaattttagctttaggggactaaaacacatggacggaaactaatgatattgaaagtcacggacaaaaactaaagattacccattttcagggtgttaaaacatcattaaccccctagtgtttatgttacgtgatcttgaagttggaattttttttataaaaaaaaatggtgcaaggttatattgaaatggtgatgctgctattatttgatttctagcgttacaatttttggtggtttaacttgtgagggaaattttgttttgggtgttttgcagatcttgtgcagaaacttattgacaggagcaaacatattctagctgttaagtttgtttttaagttcaatcttgctcataagattccaccgattcccattttgaaagctcatgtgaatgagtctcagaaacttgttaaaagactttccgaagaaggtaagtcacttgtaagtatcctccccgtgattggtttatacctgatgtatggtatcactgcctgtatttatttgggtgtttttgcagaatgagatcatggcaagagaaatccatgcattgaaatcggcgattaaggttattgagagtcataatcttcaataaagttgttgaaagcctccctctcacttctactataatctcccactcccactcctctttcctccattcttcttacacaattgaaatcactcaagatacaccaacacttgatattgctagtggcccttttttttgtagaagttcctcccataatttaactttcttttgtctctcacaaggtacatatacattaacaatagtaactaaagaatgtgtgtctctccaaatcccctccaagccaatataaccctcaccacaaaaacaacttactacctccaagctttccgagtttcacaaagtaatcccccgactgatccaattgctggacttgttacactttttgcctcattttccccccagagagcattgcatagagtatcaccatttgccagcatcttggtttcttgaatgcacaacacttgaatgttctcctttgccaccacattcctaataaactttcacttaatccttcccccaacccctgctcattgtatatcattagtctcatatggacccttgctgcatccctcctcataacatatctttatcttttcacttcctactatttgatctctattcttcatctccaccattttctgtttcataacagtttcatcccgctcataagatacgcccctcttcagcccattttctgttgcatatactgattccactatcagaaacattattactaagatcatgttgcatatccaactgtttcttcccttcttattcttcttttcttttcttcttcctcttgctacattgtcccccttgagattgtattattgaacattaccatatggtaactttgggtttgtatagaaaaagatttctatacaaatttataggaaaagacaataagaaagaaaaattaaataaacttttttccaaactaatttgcaaatgttctcatattagtttcttaaaaaaaagtttaacttctttccaaaaaaggataatttttaacttatgcatgaattaattttattttattggagataccgtgacagggaatatggtttgcaggacaacgagccccagcgtaaaatcaattatcaagaaaattttccagtttattctgtttcttccttttcacctagctagtggaaggctttttgaagttgttattctgtttcctcctttgtcttattttcttgcaagaatcaccaatgttccagtttaacaatgatttaaaataactacctatctttcatgccttgtaccaatagcttcatcattcctcccttttctggccatatatgttctattgagaaattagtcatcaattcttaaccccaccatctagatcactattgttcgtattcaaagtattgaataaatgtttcaacatatatagcaaagcttcttatgacaaattaaatgaaattaaatttgagggctgctataaaagagagcatgggacaacctacatgtggttgcttgctgaatgtgatcagtctctctacaaaaaatgtttgagaaaattatatctattgtctcattggtttccaacatgaagttcttgcagctgcagtacctagatgctacagcaagtctatctccaaagcaaaaatgaatggaaagacagctctagtttgttcatttctcccattattgtaattcaacttatttgctatatggagcatatgctatctttgttaatatatatggctaagaactttaaagcggaaaatgcggatcagagtgttaacagttatttattgatgaaattggatgaaaatatggccatttcacttgagagagaattatgaagatacaatttttatgaacttaactgatgggcagatctaatatgctatgattttgtattaaaaaaatttgtgatagagaaacaacgcagaaaatcatcataacatatctctagacttatgtaagttaacttcacatgtgttattgaagtttaaatttaattgtgcggcatgtttttatttatacaattttcgttcatttgccattatacttcctgaaataagttcagtttagaagataactcacaaattgtgacgataggagcatattcaattatttactatctcttgattttatattaatatcttgcagcacaaatttgcataaaatttaacgattatacataacgtgtgtactttatgccgatcatgtcagcgtttatatcatatcaaatttatacaaaatgtacttcatacatttttattttttttgcctattttgctaatgtgccttaaacattatccttgacaaatttaagcacgtgggttgatgaactaacaaacaaactctaaaccaagaccaactcattctctgaaggactcaactacctgtaaggaccattggaccgtctgttcgccacataaccctctaatctggataactacatttcccgacattgccttcatttcaaagttgaatctatctatctataatggcatacataaataaagtcttgtattatatttataaatgggagtgctttttatacataatttttttaaaataaatctgaagcagacttatttcacaccatttattttttccaaccctctttccttttcttattgagccgtcgtcgacacctttataaaacctgtaagtatcttatctgtacagataattgcaattttttgcacctatggaatacatgtaaaccacaagattgacaaaggcgtaggactcagctgtattcaaatgtgaggaaacgatttatttaaatagaaaacttatgtttgatttccacaatatacaaaatttttcttgaaccaacggctgaaaaaattattgcaatttaagagatacataagaaattttacagttaagaatatactttttttacctattgcattccaacttgcaagtgccaactaatgctccagaaaggaagggttagccatgacctgttttttctaaaatatttgatagtactactgtaaccatataaagcgacatactctattttcctttggtacccttagatgtaacattgaaaatggtttttcaaacattttgtcagctgttcatcgatggacctttaaaaatttattataaaataagaaatcaataaatatttgaaactcattctcaactccatacctatcaagtatctaatactctcctttagtcacctcagttgattaagttgcgggacatgaaattgtgtgtaagtttgatcttttacagtgtgtttcaatctttttttattctctttacttgtgaggctttctatgaatttttcccttcgggaaaaaaagaacaaaacagcattcaaagttctttatattaagtgatcttctggagtttctttagaatatttttttaaaaaaaaataggaagaatacaagtcagctcatattttgtaagtttacttctagttttttccttaaactcccaacaggaaagaagccatcatgttttaattatttgtgttctggttggggggcggggagaacaggttattactggacccaaaaaaggctgacctctctttgtatttaagggggagaaattgaaagagacaaatgtgttaaaactcctcttaaaaaaaaaaaccgtcaagaacataaagaggaaaaaaaaatctcaaacgaagaatattatgccgagaaaaacagatctcagtgtggcctgaggggggaaaaccgtgaggatacagatcttagaagctcaatataatcaaactaaataagaacacgatttatatttgaagaatttgaatccattaacccacaaggaatcaagtatttaaataagaaagaataggcaataaacacacacacaagaaattcccttgaaaaaactactagtaatggataagcattgatcaaatggcataacaattttatataaaaaaagaattgtgctgcttaatcaatgacaactactttggggtccacttgctagagaaaatacatccatccgtagagaaatgggggttataaatttatattatacaatataaaaattcagcatccttcgttcaatgtttctccaagtcttccctgatcttctagaagttggaactcccgttcaaatctctggattaacctgaactttgtttttgcaacatatctcatcctatccctaactatattttgtaatattggatagtagaagcatttcaaatgaataaaataattaaataaataaataaactttgtcagaataaccaagaagcattgccatggcagcccttgctcatgctaccatctgctcctgctctatatacagctgctccacccatggtgaaagcatctctttactgagatcatattgttggttctcagcaccaaatatctcagacctctcggagggaacatctttaaccaatgaatgaacccatgagacatccggctcagcaccaaattctggctgtgctatgggggatgcagttaccccactgtttctgaacccaaaggaagtagatttcctcagcttgttcagcttgtctccgtttacaccccaatccagtttcccagtaggggaactccaatctgaaagggtagaggagaccctgcaagaagggttggaagctgaagacagcccaagatggtgggttgcagctccacggtcaatgaaactttggcttcgttttgcgaaggcagcggacctggaattcatcattgcagttgccacagcagctgatgagtcaaacccaaaagctgagggcttcctcagaggagaggaagggatgttggatggataactcgcacggaggtggttcatgttttggcgcatctgaagcccactttgtgtgggtgttgaaggttgcacagaaagtccatgtaattgagataatacagaagggtcagcagatgctaacaggtcatcaaggttagtaggattcaaatcaacaatcctgttgaattcctggctccgaaaagatggggaagagatcctggcaatttcttcgatcaattgttgttgctgctgctgttgttggcgagcagggctttctagaccgagcagttccatctccatctccagatccctggcactcaaagcggccttcagtcggctaccagggagctgcaacgatggtggagtaaggtttattttgttctgccacaagcttccactcttgggagatgaagctactgccaagggagacatgggtggggttgaaacacttggcatcggcaaagatgtggaactaagagccaatggactcatcgctgtcatgtcaagtccactagctgaataggattttggtgatggcatagccgacccagtggaagcatacacagggcgtagttcttcaggtttatgagcaaagaagcagacttttctagcacagcccgtctcatccttgcaaagccttgtccggtattgggcgggatgtagccaggactcaaaaacaccatgagcatactcgcaggaatcacccttctggcaggtccctttgcggaactctgggcaaggaacacagctgtaagggtatttccgtgggtctctcctcctcgcgttctccccgggatgaacgaatggacactcggtccagtcatgggagtaagcccttgagcaaggcttcaccttgaagttgtacatcctaaactcatctgttccatatacaccgttgttgatgtcaggcagtgatatatcaacagggtattctttcttattatcacttccttcttttttctctggaacagaaaacatctgtaactccatctcctggctcatgagttcatctctttccccaccacccctgaggaacatctccatagccttccttcgcgatttggacaaagaatcaaaggcaggagcaatcagattaaccggcttgttgccactcgcatcaaggcactcagcatcagccccagcatcaagcaagagcttgacaatctcaagtgaggattcggagccaccagcaacagcacaatggagagcagtggccctatcagaaccacagaccctgttcacatcaacacctcctcctttctcaagaagaatataattgagcaccttagcgcttccaaacaaagaagcaatcatcagaggggtcctcgtttcagatcccatcttctttgatccaattcttctaccataccataagcctgcctcgttcacatctaagcccttttcatccacctctcttttgaaagcctcataatcatcagatgcagacaattcaagcaaaaccgagttgtagagaccatccagattctgcttctgaatgttactactctccatgacgactagggttggggaagaaagtttacttttagaatcactgcacatgatgtcccaaaacctgcagaataagacaacgtaatctcaataagcctttcaatttataatttattattcacacagaataaagaaaaacgataaaacctcaaatttagaaacagagtttccaaaccctagttcaaatccctacagatacaaagctaagcaacgtccccataaaacgtgttaataccaattttaccaacaaaggttagatccataactaatcctatccaagacaacaacaacttggtattccaataaacttaataaggaactaaaaggaagaaaggtgggtcggggcgaaaacatgcaactgccaaaatctgaaaccaaagtttgaaactttaatctacccagaagcagacccacgaagcatattcctcagacccacccaaaacaaccaaagatctaaacaagaacacccaacaaaaaaaaaaacaaaaaaatgtatgagccagtaaaagcacggaaagaaagacatacctttttgagtagagtagacactggaacaagtattttggttgcaagagaatagagcgttgtgttgtagaaaaggaaatcgagaagacctcgattgagcgaagaatgaagaagagggagaaaggggtggccctttttattgtcagcacagcacagcagcaacgggaaagccaaaggaagaagggaggaaagtgtgacttttcttctcattcttctctttggtcaaagtcggcggcttcttccaatgtgagtggtaaaaaattgaatggctgaggtctttttattttttattttttatttttaaaatattttattttggttatgagacataataaattaggcattaaaaaagtaaatttaaatttagttttaaaataaaatgtttgaaagattaattacgtgaataatttaataataaattgattctttaattttgtaatataatattaaagtgaacttaataataaaatttattattaaattaatctttgttatcatttaataataaaatattttcacaaatttaatgataacacccatctatttgttatttttttcacattatggtcgagagctcagagaaaggcaacttcattaacgggtaaacttttaattgtttttggttaaaaatattttgttttataagtaattagttttgcctatcaaaatgtgaaagaatgacaaattaatcttaaaagaaaaaaaaattaaattaactcctaaatgtataaaaatgtgagaaactaattctttagataatttaataataaattaatatctaaattttataacttagtatcaaattaatttttaaaaatataatttattatcaaataaatacttaaatgatataattaagtataaaataattttatgaatttaaaaatttatcgcatttacggaaactaaatttggaatgaattgcatattgtgagtgccggaaggaggtggtccaattggttcatggaaaggagtgacgaaataaagaaaactaaagtaattgttataaaacattcaaatgtaattagaaaataaccgattaagtgagttccctttcttgaatctcagcccaatattttagttatatatctaatgataaaaattaatgccacttcaccctagaactagaatagtagaatccatcttcaaatgcagctagctcaaaatctttgcatacaacgaacttcattttagtaatcatggatatgaatatgcagagttataatgggcgataaagcctataaggtttgaagaagatgcaaagagtgtgagttttaggcgcgaacacaatcatttttaaagtgaccattttcatagaagatcattgcacctcacatttatctcatacagtctttttaatatttgcacatgcagaatctttaaaatctgtttaaaaaacaaaaagaatctttaaaatctaaacacgtaaggtatatatacataccacacaattatattattgcaagaaagttaatgaattaaagagtatgttcatgaattgtgttgtccatgtcatgactattcacttatcattgattttttttttatcagccattcaatattgatatgaattacaggatcttgtacaatataatggctgtatttgataataaaattatctgacatcaaataatatatttatataatcttttatttagtagacaaaatatatttttagataattataattttgttttttaattaatttaaagcatttactttttgtttgaaagtcaaatactgttataataaaaataaataatgtggtattaaaaactattttttgttaaaataaataatataacattaaaagaagtgataaatgaaaatgtttcttaaaatattgaaggtaaaaaaactgagttcaaacgcaaattcaaaaaacatttaaaaaatattataagttagtaaaataatatttaccaaacataagtaatttaattaaataaagtatagtctagttaaaataattttaattaaataaattaaaaggtagttaaattttgttaaaacaagacacttgacttccttctttgcaagtaactgctattaattgtatttcattctatgaaagctttactagttagttcaattcctttttattgggaactatttaagggaaagaaaagttatagttaatattgtaaaattgaaagtggaaaatcaatgatgattaaaaatggttattacccgttaaacttgttccactctaagagctatgtaatttaaataataggcagtggagtaaggaaaagtatggagggagcagaaatagaatagaatgggtattgaacgcgtcttcgttgtaccctccctttaataatattaattttaaaataaaactttgaagtgaacgcgttttcgttgttgtttggctgattctgttatataatgcttctgaagtgagtaacgttgacagagagcactagtaggataagttccttcctgattcagccttccactatagactatagactatagcttcaaattcaaaaccaattcctctctctcacttacgctttcataagtccatgcattttttgccctttgttctttatttaaaaacccaacaaagtatctaatcttattttattgttcgatagggtgtttacggataggatttaatctgattagattaaattcattatttaatctgatgaaaactttgcaagttaaattgagttttaacaatttttttttataaattcgattcaaatcaatctaaatagattaatctagtctaaatatttgaatatatatatatatattttttgtaaaaaatatttttttttagaataataatttattcttacctaaaattttataaatatataactactaaatatatgttaatatgatatttttattttagatataaataaaattttatattagcataaaaaaatcatgatagagataaaaataataacttaaaaaaatatggattgtttaatttaataatttaataaattatatgagttaaaaattaatgtattttatatttaataattaatttatgatatgaattggattggattggattggatcggataaaaaataaaactcacaatccaatctatttataatcaaatcttaattggattgaattagatttgatacaaaccatttttaagttaatccaataacacccctaagctggaacacatatttaattcagatactactactattgtttttgcaggtcattgcctaattgtgcttggttaaagtaggagttgtgagtttggtactatgattaaaaaaagtaagttttgaattagaggaaaaaaaacattatcttcttagattttgtccaaaggtttgaatattttttttatcttgtaattatatcaactttcgtttttaatttttataatttttttatgattttttacggtgttcaattcaaatgttcttattttttattttatcccctccgattctttttgtctcgtattctaatagacgtatgtaagtatgtttgtaaggactccatttgatcatcaattcaaagactattttacttaaagattttcattaacacccttcactaaaaaaatagctcaaggacccgtctattccgatcagagtgataagggcttgttagaattcatgggtggggagaaaagagagaaaagtatattttactcaaataagaaaaattattacatgagtacaaatgtagattatatagtcaatcctagtaatactaatatcctatatctgtaataagatttgtttacttggaatgaaacaagttcaataagtctaatttttcatgagacataccaataggattttgagacttactataatcaacatcaaatgacattaccttgaagaaattattaatttatcgtaatttttatatattcatgaattaaatttaaaattttcattttttaggtattaatttgtcatcgcatcacatcttcaggatgaatttgactatttacccgaaaataaatcaagacagagttccgggttaaaactgttaggagatggtattatggcgtgactttgtttttgttttgttgttgtagcttgttaactgttaggagatggtatgtatgctttggtctatagtagttgaagtctctttttatgaagcagcccaaaacaatatgtttgggttcccatcaccttgggctaatccaaggtatgtgacactcattgtaggaaaataaacttttgggctgtctgagattttttagtctatagaaaactaagaaatctgcctacgggactaagtccatgacaaacacgtggcttaagtttgaatcccaggtcttcttaatccttatggcgggttatttgtgagtgccctgcgtgggcctaccctgaatctggatttcagcaaccattttcccgctctattttttttttccaaaaaaaaaaaatataaagaaataatcacattgaagctggtgagattaagattagctaatgataaaaaaacaatattaagattaacatttttttatttactatgttgtaagtgcaaagtatctatcaactttgttgataattaatttctgtaaaaaaattggtgaccatctttaatgaaagatattattttccaattatgttcatttttattctcaagttcaaaattcaagattttacttaaagaaactcaattacattcgaaccaacgtaatgtgggtggaataagattagcttgagaaaatgagttttgacacttcgattatacacacactagggaggttctgttaacaattttagcaccagctgattttgtgatacatgtttctgtacgtacagtattttgatctttacgtttcctggacgtcattagctctgtcaatgtgcattagcttgagttttaccgtagaatagttaacactaaagaagggtaagtgcatgagaggatttttacactgttctacctatgaagtgatctattacctaagaaaagatgtgtctgtattattatttggtgttgtatagattgttcctctcaccttttgagatcattgctaattggtaatgtaacatgtaagagacctcgttttctatatgtttggaaatgtttactacactgatggttgagacgtattctcagtgtgttccatgaaaatgggccgtagatgactggccagctttcttcttttttggttagtgaatagttagaatttcattcagaagaaatggactttgcatccctaacaaaccctggacgactagctttaagcatagaagttggaatttggcaaagaatattagtgaatatattattgaagtctgtattatggtttttatcaacgggacatgagtacttttacaagatttaacattagtgggaaatacactatgcggagtcaagattttaatattagtgagcacagattgaaaagtggaatttgattgatttaaatatttgtcaaagaaaacttaattatagaatatatgcagaaatattaaataaacttaattcattcttatgttttagtaattttttttagacaacatgttttagtaaattggaagcgttgaatactagaaaattataaatacatagttttctgtataagttgttttagctgttcaacgttattatttcatgaaatgaattttctctggatttttaatttaagtaatcctctatttttgtgaggaagtttttcctacctcgttatacacgttcttgtttttattattctcattgccgaaaagataagaaaattcaaaacaaatagaggtaatttatttgtcaatacaagacaaaacaactagaagcaatttatcaatcgtaagatgggtatctattcagtttttggtaatttttaatatatgattcatcaatattttattattcaccttcggttttgaatgatatcaataggaacttttcattcattaaattttaagggaatcaacaataaaatatgcaatttattaaaaataagaaaaaaattaatattattggggtttaataaaattttattcaatgctcctttatatatatattgaccaaaagcagaatcatatcatttcattaacaatgatagacttctttataaaatattaagaatgatggactgaatacagtaagagatactgttattaagagtatttttaactaatagtcgaaaattagtcctttttaaaatatagagataattgaaataggctctatctcatctaataaaaaaaattccgtacacattattaagatccaaactctgtgagcactgagcatacttaagggatcatattaataaaagtattaacaaacaggctttttatgattgagtacctttccttttaaaaaaaagtaagagtttcttctccacattctgaaatttaaaaattagtttgtaatcccattgttaaaaatcttgagaatgagttttctttctcctttaaactattttatccaaaattcacctctaagattttcacatgaaattctgaagatacttaacgaactcttaatgtgataaaatctctctttctatacatcattttttttgcgacagttttcaaatttcattcattaaataaattcgagaaagcaaatgcactcagccatttccaaagtttgtaaagtggcaaaaaattattggatgaatagatggtcggtaagatggtgagaggaatgccaatgaaattaacaactcttaactgtttctactttctacggtataaataagggattcatactttaattttatctgggaaattttgtcagcaaataagaaaaaatgttgagagagatagataaggtaggtgattttatttttggatagcatgctctgatatgcaattgaattgaatgtggcatgctttaacatttaatatagtaaaattcattagggaggaaagatattactcgataaaaaaaattgtaaagaattagaaaaccagtgagacctttgctttaactgcatctcaagccgttaaatgcttagatttgtcgttgttttcctatctcttcacctaattataggctaagtacacccttccttttcttatctgtctccacacaggtaaaaagtaaaaacacacaccgaatggataaaagaaaacaaactataatgaaatgtttctatctcttgtgcttttctagaccatatttcattaataatactctatacattatagtagtaaaccaaaaattgagcctcaacttctttttaaccccttttagtaaaatggtatgagattagtaaagaagatatttaatagtgtgaggccaacatgttaacttattctttcttagatctttacagcatatccatgaaaatttgacaacattctcatttattgttgtgactgaaaaatacccaaatggatttttttttttttttaaatcagcaaacccaaatggaattaattggtcaggtcaacaattgccacatttagatgccctaaaccatgtagtattgtccaaaaacctcaaacacaacatgattctgtgaactagttatggtttaatccagttctcttcgctacatccacttactaatttttttgtgtcacacacatgacataacccccatgggaattgccgacagagcattccttgaattgaatcatgtgatcaaagttcaaataacatagacaaaactacacactgaggtcattgcttgagcctgactctcctattcatgagattaaattatttgaatctaaccctttgctgaaccaattctggtttggctttggctttcaacttgtggaaagggaaccgcagttttgcaccaatcactcatattgattgtgtatggtgaagagtaacatagagttggtacttggcacaccacttttcactttcaactcttacctagccaaaacacacatcaaacacaaaaaataataattcttttaacgaatagtaaataatcattttgttacaaaatctttgtccaatagtgaatcattcattgacaaaatcatccacctatcagctttaaaaagtctaaaagctaaatctacacaaccgattattttctctctccatcgcatccgttcacgccttaatttttttccaaacaaagaataaataatatatactgtattttttttatattatcaacaaattacttacatgtattaatttttataataattattttaagagtttaatttgtatgtaccattaatgtaatttttttttatattatcaattaataagaaattattgttaatatgatttttaagttgattattgtaaaataataactttttacacttacaatattataatcgaatgataatatgattttttttatattattgatgtatatcttatttactcttatattaataataatttttgaataataatgatccatgcatgtgtattaagctacaaacaattcaatatgggtattatgaaatcatcttgacttgaaaaatctaaaaatccaaaccaaactaataaaattggtttgaatttgttgatcaattagttcctttcattttaaatataagcaaaatcaattatgattcgttttgtttccattttttttaatccaaactaatcctacgtcttatcaactttctttttttaacttttgaaactaattgattttagattttagtatttcatttttcttctacttttgtttttctttccttttttatttattttgactttcttattattttatctagtgttactgagggccttataatttgattatgtttattttatgattttttttatcatatttggataaataaattaatgaaatatttaagataataactataagaaactaaatactaaatgaagtaaaaaagaagaaggaatgttacaaatacactctctaattcatttccaattatataatactattatcttatttataaaattttattgaaaatcataatagtaaagttcattaaataaaaaataagactcctataatattatgatttctaataaaattcaactaataacaaagtttgttaaaaaaaaatcttcttgatatttttgataaaaaaaaaactagttattaaaagaaagaaaatttctatcttatattatcatattaatataatattgaaaatttatataatgataaaaaaattgaaaaattatataaaataaacaataaataaaaacaaaaagttaacaatataataattttttttatcatgacatgaatcaaaccaatatactcctataatcttgggaccaatttgtttaaacttattttgttggaatgaatatttattttaataaaataaacaacttttttgtttttttaatgtgtttgtatacactgtttttgtttttaaaaaatatttttttgcttattttaaaaaataaatcttatctacttctttaaagaaacacttatataaaaaaatatttattttaaagttattttttaaaatttaaacaaactcacttttaataggattaattttaggctaaatagtcattttcattcctgaatgtatagagcgctgacaaattcgtccttgaaagatgaaattcaaattttagtccatgaaagtaaaaaaagtacaacaaattcatctatatgttaactttcatttattactgttaatgaaagagcctacgtgatatagatatagatggacataaaatgtcacataaaaagattactaacatgaatgttgaatagtttgaaccaaaatttcagtaaattttcattgaaccaaaatgtcaataatttttcattgaactaatttgtcatatcccaaatttcatttcatttaaaggtaaaatataatttaatattaatttccctccttttttttatcattgcgagaataaacattataataaacacttaaaaaaatagggaagcaaatataagttagaacaaacataataataaatataatattaattaataagtataatttgtctgttgcgatgaaatttttagtgtgacagtaacttagccaaaatattgtaatagtacaaaaaaattgtaatagtgtaccaatcatttcattttggataaggtactggcacattagaaatctccgagtaatatatagatcatgactattaatcaatattatgtttatttttctatttttttaagtgcttattataatgttatgcttgcaacgataaaaatgggagaattgaagattaaattatatttttcttgaataaaacgaaatttgagatctgacaaattagtctaatgaaaacttattaacattttggtgtaatctatttaatagtcatgttaaacaatcatttttgtgacgtttttgttcttaagtgtcatataagttcttttattaacgataataaatagaaattaaccaatcaatatatttatcgcattttttacatttttaaaaactaaaatttgaatttttatttttcgaaaataaatttgtcaaccgagaagtaaaattaactaattacctttatataggaccaaaaatattttcaaaatcagaatgaatccgatccaaccatgaaaactccttaaattcaacatcaattattactatcatgatgactttttttttatggtgtgagtttagttactcagaagtaacaaaaaaaaaaatgttaaaaagggtttaaaatgacagagaagagagagtcacagatgaatgaatgagttgtgtgagaaagagatccctccaacgttgcaagtcaactgagagtcctgctctgctctcccaaacatctctgacacaacacacaccaaaatgcatcattgaaatgacccttttgcccttccttccctccctacttctcctttgactctccgcaacgccaccgcccacaatggacgccgccaccaactccggcgaaccccgctccagttcggtgctccaaaatactggggcatccgaggatccgaatcgaagcgggtcgggtcagaattcgatggcgagatacaagctgttgtcgccggcgaagcttccgatctcgaggtcgccgtgcatcacgattcctccggggctcagtccgacgtcgtttctggaatccccggttcttctttccaacatgaaggtgagtgtgagtgtgctcatttgaaatctttttggtttcggtgaaaaatggaaataaaatggcttgtgttatgagggagaaatttcatttttcaaaggggtttgtgttttctgagaggaaatggattagaagaaggaaaggtaaatgcttgagtgaattcattgggggaatgttgttgtttttgagttcattttggtcaaaggtttttttttgctgttttttatttttacttgacccatgtaaggtaaaggtcacttattgtgagtggcgtatcaaagttttgttcttttcactacgattttcttggggtttctcagctactcaatagggcttatctgggttggtgtcaaatcttttttttttttggtggaataatttgataacttaaaatgacttgatttgaatgctgatgagcaatgagctgaagatgctgttttttgttttgtgaaattcgaaattcttatatgctggtttagtctcgtggcacattgtttctttagagttggctcttcacttgtttgattttgatccttcacttactagttcatttgtgtatgggtccgttaggttctgatgcttttgctcttataggattatgtattggctgctttatgctcaaataaatacggtgttctgtttagtggaatataactttagcttaggatcgctcgacattctccttttatttatttattttagtgtcagtgttgttttttcgcataatgaatcttcttttttgttggtgcttgccctttttgtttgtttttgtttcaacggtgcagcagagtgcaatgaaaagtcttcttcttttcctttactatttatatatgtggaacaaacgaatcaatgcattgcaacgattagtggattgatttaagttatttgtgctgtgagaatagtataaggaatgccagaaagattgtgggtctagattttgtgggacttgtttctagacgttaatcgtctggatggtcctaatttgagtagaattctgtgctacattcatgtgagagtgtcttttctttgttatgattgattgtttatataactaacttttgcatattataatgtacaatgctatctttgtcaaactgactccaaataaacaacatgcaatatcatcagcaggagaaaatggagaactttgcttacgctcagttataatgggttgcttacatcactggctgataaaactgttcaattagttggcttattcataagattatatatatatatatatatatatatactctttttccgctgttattactgatatcataggttgattgattgctgtttgaggccttagggtttgcaggtattcaggaacttgcttgttttggcttcccccctcccccttctttttattgtttttttgagaatttttttttccagtatctttttgtgcatttgaatttataatttttcatttgactcaacaacagttgctcaaagaatattatagtttaaatattatttgtgtccatgcattgcaggtggaggtttcaccaactacagggtccttccgtaagctccaaccaacagtacatggttctatggcttctgcttcctctgctacatttccagtaacctctgcctgcttcaataccaatactgttgatgccagaaaatcaagtttctttgagttcaaaccactgaatagatcgaatatggtaattaaaatcgatgttggcaacactttgattaatattactttcaaatcacatggatgaaggggcttggattttgtttccctttctcccgtgcctttacttggtttaaatctggatactaactaaacaagatggaataattaatcagatttgtcaagattgttgttactcatcactttgtcgcattagacaaaatcaattccgaaagtcatgtttcatttaagtagttttataatttataatcctttaaatagatattttttggggggttaaagtgttaaatggaaacaaattgcattgtcatgtttcatgttctaattaatattgttttgaatattactaattgcctagcacttatccaatgctattcactcgttttaaggttcctgcagacttcaacaaccatgtaagtaaacaatctactcaagtagaaggtccaggaaaaactcaatcatttgcttcctcacccttaattgaaagtgagatagcagttccttctaatgaattaagcctatcatcacctgtacaaaaggttagttctagtgctagtgatcctgttgatgttgatttggatgacattaaccacaaaggcaacacagctactgggcttcaagcatcacatgttgaggttagaggcagtggactttcagttgcagctgagaaaacatctgatgatggatacaattggcgaaaatatgggcaaaagcttgttaaaggaagtgaatttcctcgcagttattacaaatgtacacatcccaactgtgaagtgaaaaaactttttgagcgctctcatgatggtcaaatcacagagatagtttacaagggaacacatgatcatcctaaacctcaaccaagctgccgatactctactggtactgttatgtctattcaaggagagagatctgataaggcttctatggctggccgagatggtaataccagccatctatcttagcttccattttattgcaaacaaaataactggctttcttttcttctcattcttgaattgtagacaaagcatccactatgtatggtcaggtgtctcatgctgctgagcccaacagtacttcagagtcatcacctgtagcaacaaattatgatggtttagagggtgccgggtttgcgtcaaacagaactattgaagaggttgataatgacgatcccttctcaaagcgaaggtatgacaatttggttgaagctctggattttctccagcatgtgtgctcacttgctgctgctgaggttctttttttttttttttttttttgagcagaaaaatggaacttggaaatgttgacatcactcctgtagttaagcctattagggaaccacgggttgttgtacaaactttgagtgaggttgacatattggatgatgggtaccgctggcgtaagtatggccaaaaggttgtgagaggcaatcctaacccaaggtatgtcctcacgttgatgaaactaagaatagaaattaatttataaattccaatttaatgtatgtgctttgtccaatgaacttttttattaatattgtaaaatgtcaagttttttctgttgtacttgctgtctagacaacagttaaagtgaggaatcaacttgatataataatttattgaagcctatatatattcacttatcaaccattttgctttgcaatctgtttcttttattatcatgggttttagtatagtctgaggctttgaggcccctgttgcagctttgtagccaacatggtccataaaaaacagtctgtatcttacattagagtatattcagatatacagacatgaaggatatatatatttacaaaaaatggagggaatttttggtaaacaccaacttttgtgggtttaattaagaaatacaaggagtaacttcatagatttgttttggtaagggatactgagatggacatatgggtgaaggttgatgagaactggtggggatggaggatcttaaaaaggaactagagtgactaaatacctagtaattaagatacaagttggaaattaaaagcatgatttctaaaagtttgcaaagaaacagtggcaaattaaagtggcagtagattattagatataggaaagtattgtggaatagatgttgcttccaaaggaaaggagtgaatattaattttgcaagccaatacgaagttataagaaaacttagggtggggtgaagaggaagggcaagaagatattcaggcatcattgcaatttttatactcagttatgaagatggtaggaaagtaggattgccatcctgctggttttcatgaatgactagtgttagccgatcccaatgttacaactaagcctgcttattgatgtcattttattatgtcattgggcacttgtgaacaattatttataaatagggctatattcacctaggaaatgtatgtactaacgcattctatttcgtggtgacaatcattactgtggatgccataattacagactcaaaaggttacttctcatgattccagttatattagtgtgtcgctacttcaggaaatgcttgaaagcttggaattaaaatcaaatgtgtgcttcgaccttgatgaatgaggcttgtttcatgttaatgatccatgcttatgatactaactcgctgcagtgctaaaatatgctactcaactacatattttttgttaatcttgtatcttactatgcttcttattcaggagctattacaaatgcacaaatgctggttgccctgtcagaaaacatgtggagagggcatctcatgatccaaaagcagtgataaccacatatgagggtaaacacaatcatgatgtaccagctgcaaggaatagcagccatgacatggcagtaccagcagctgcagcaggtggacagacaagaactaagttagaagaaagtgataccattagccttgaccttggaatgggaattagctcagctgttgaacataggtcaaatgggcaagggaaaatgctgcattcagagtttggggagacacaaactcatactagcagttccaacttcaagtttgttcatactacctcggctccagtatactttggtgttctaaataacagctcaaatccctatggttctagagacaataggagtgatggtccatctttaaaccgttcctcatatccatacccacagagcatgggaagaatactaatgggtccatgaagttgattacacaacagatattaaataaaaaactacgagtaacaatttgctttcttttttattatttttggcgggtatagcttcaaatgtgtaacatctcattttctgtaagaaaatgcagatagttcttttatgtttatatcactattccatagcgcttctgtttagtagagttgttagcagctccatcttgacttttaaatctaattgccgtttgtaattgtataattataaattataattgtatccaaattcttctgtataaatatgaagctgatatcaaagttacctccacaaaaccttagtccccactgcactggttacaagtcgtacataacccgtgattgatgacctgttttgacatggtgaaaattgaagtgcaccgtgcactaaatgatatcatgaatttgtacatgttggatattctcaatgttttgtgtagattggactctctaaggccattttcatcctaaacgcctcattttctactttttacacattttaaatgaaatttcactatcatcatttatttaactaaatacgtctcacatatgatgtaacctagtgctccttacatttcatcaacattaacattccttttgtgtgggtcttgttaattagtattcttagggtattgattaaagaattaaaaggaagaaatatttattgtataaattataggagtaaaaaaaatcataacataattttttttctctcaataaaaatatttttactttaagttccttaatcaatatcctcatagtacttattaacatttatcttcttttattataaatacttattttaccatcttgaccccacacagaaacaagcacatgcttaaataagtatccgatgtttgttaagacctgtgatcaatgattgtcttaataagatgcggtgcttaatgagaagatttgatgttaccattgcatatcaagatggcctaacacgattttttttttattttttattttaataatatgattgagagggatgtgaatatagataaatgtgtctattctctattcacatacgaaaaactcggtggatgttatactcttatacgtacatataccttatcctcacagacattaagaattcaatcctttggtttcagcatacaaaaggacacggtccctttcaccctgtaatttagggagggggaccgcagcattggcaaatgtgctgcacttgttgtttctagaaaactgaatagaagggaaaaaaatggggattttttctttgcatgttcctagtacattgcaataacattaatttagccactgtcatatttcattgccacttctcaaggtgtgattagtttagcgtagtagtagtatttggactttggagtgcattcaagaattttgctagaaagagaaacacaaatgaaaggtgatggagccaattgaataattatgttataactgaacgtgctagcttggtggaagagcaaaatgaatttaacactatttttgcaataaatatacatcttgcattttagcacgacatttgcttagatataggatgaatttcttgtattagtcaatcggcattgggatttacatactgccatacttggaatattgattgataaatcctttatgacgattggattctcttggctttatctttgaacaattctgacatgttcacgttggtctttaattgcagtgcaagtaaagtacaactttcttaaattcatttatttgtcttagcttaaccaggactgaagaatcatgcagccacgttgtgtcctatttatggaatcaagatgtatggattatgagctgatccttaccatgagcacaaatctgtatccttactatatcatcatcatctagctagaacccattatgatttttttatgctaacgggaatggttcttgtttttaaagaaataaacaccaaattagagataaaagaaagtttgatctcttgtttgctttattatttatcataaaaatggaaaaagcaatgctagtgacatgactctttataccaaagaaaaaagccacaaccatgtttctgtatgattgtgtctttaatatgtgaagcgacttttcagaaccaatatgcaaacagatgatattctattttgtctttagacttgagcatatcactttttctttttcataaatgaaaagagaaattatatatatttgtacaaatagtttgtaatttttttatacaacagatagaggtaggaatagaagaaaaatgcaagataaatactgcggtgaagagaaataaagagaaaattgatattgtaaaaagtgttgtatgaatgatataactcaagcgtaagattaagcccaaaaaattatatgttaggaacatatttcatgattgaactggtgaagttaatcttgcttttgcaaaatttgattagctaggcatatgatatggacattgtaactaaaaatcaaagaactgcttgcctaaaactgacaaaagaacaataaatgactaaggagagtccaccgtagtcttgcctttctcaagcattccagagcagacgtttctcactcatttttaaaacagatccatcatctgtgtcctatacggacagaaggaaaaagaaaaggttgaaatatatttttgtcctaatgctacatgcattttaattcaaaacttgtaccaaaagaggttttaatttcttttaatgttattttctttgttgccgttacaatgcagtaaaattaacacacggtcattgtaaaatataaaaactaaattgaaaacaattatgcataaaaacaaaatataatcttttatccatatacataaatttcaatttggtcaacagacagcaagaaataaaaacaattatacctttataaataaactaattttttccctatatgtataaaattgaaaatgagtttagtgaacaaaaatttactctttgttttttgtccctcaattttgtgcatgttactgagacaacaaacttgttcacaagaagccattccttttgtgctcatatatttcaatccacacagggaggaagaggagcgaaaaaagagatgcatgccatatgggtctccttgaaggataatgtcaaatgtggaaacaagctcaacgatgtaatcaagcagcaaacaaaatgcggcaaaggaagtggctatgttgcagaaaaggagaaaatgaatggatataatagacctctaatggaaactccaactagcctagtggtttcaagaccaagcaacacactgggaaggcttcatggtaagttactaagttgcatgctgctcctatttgcatgaacacatcatgcttttgtcttcaaaactcagtgtaactcggtgtgtcatgataaagaagtttgaaatataagaattatgatttttcagaagtccttgtaatgtaacgggcttataagaagaaactagctagagcaattggtttatactttcttacttcctttatcctttctttcactatctatatgttttgttctactaacttgttaatgtcattataaaattatggcagagcttagtgttggagacccatcaagaaaaattgtggagatgatctttcaaaaagcttggtttaacaaatcaaagccactgaagaaggttagaacagtcctcagggtgagttactcagaagaagtccttgaaaggtttgagaagtatagagaatatgtcaagaaggtggcctctgagcaaaatccaaggaatccaaggagcacagttgatgggaacgaactgttgcggttctatggtactacaatgagatgtttgcaagaaaaatctgataagaaacttcatgatctgtgtaaagatccatcttgttatctttgtcaaataattcagtttaatttcaacacacgatatgcagagattcacttgaatacaagtgacaaagagttgagaaacagaacaactgccactgccagagtacataatgtgaaaaaagctgcaataatttgcaggataattgctggaactgcagtaaatgaagttgatggtgaatatgaagggtctcactcaactgggttaggagaaatgcagtttaccttagaaaaatttgtagtaaaaaatcccagttctattcttccttgttttgtaataattttcagctaacatgttttgtaggtgtaaattgtcattattcttttatctttgtaaggcgtgtcatagcaaaatatagaatacatagtgctgcttgccattttttcttttttctactttgatgagatcgagcttgctggttctggcattattaacataaatcaagtgtgttattttaacaaactatagagtaacttgactatgaattccgcgaaagaagattaggatgatacataaactaactaaaagtctgaaataacaaaaatgaaccagttgtcattggatcatcacctccaagcacaagtggtaataagaacttgattcatccaaccaagacatagagccccatctctctcttctagagtgtaatgtccttggtagctttgctgaagattttttattgaacaagtaataaaggagttcaacggatatggtgtgaatccggccatagtgaaacgtgatctccacttctttagaagctcgtgacgttccactctttctgccccttcacatgctattaagttgacaacttctcgagccaaacaatgctgctccacattaatcctttctttgtgctccctcggcagagcaacatcaattgattcaaaaatagccaagtagtagttcattgtctcaacaaaacgggggaagaatgggaggttgttggtatgtgattcttgctcaactagtgtcacaatcttaggagacaagcactttgccaatctcaccaaccggtcacgatggttccgactatccacacattcatctggaacatggtgcaacatcatggcaaagttcacagcaatagcttcaccaggttgaagtgcaaggtctttgaattcaacctcagtgggagcagctcgtatagcatggaactcaaagggtacattatatgattttgcaagcattgataaccttgctccaacaatttcaaggcctccttccctggcataagctgaagtggagtcatcaaaacctgttattctaatcttggggggtgctccaggtctgccagcaacagcttggattaggcttacccactgaattccctggttaatctgaaaatcaataatgtggacttcactttcctcctccatggcttcagcaatagctccatttgctgacatgtaaccaaatttgagatatggacagatttcataaagtagatgcatgtgtgaaaggagttcactaccagtaggctctttacatttcaagactttgtagattgtgcttcctgaagaggccagccttgcaacaagagcctccaacatgtatgctcccaatcgttggattggattgcccgagacggagaccattttacgcaactctgacatcaaccattcagttgtctccatatcatttcctgccactgcttttgcacatgtacaaagcatctcttttaaattccctctagatatcatttccatcattctcttccacctttctgcctctttcaaaaacgaatcagattcttctggaattatggtatcataagtatccagaatatctgtatcatgtcccaacatagcactttcaagctctcttatcttgtgcctcagctcatcatcgttaagtgtcaagcaagattcgttttctagcgaatcattaacaatttcaagcgaattctgggaactcaacacatttgattttgactgcagctttgagactgggctattgttaggtgagaaactgacagtagatggagaatttagggaagggaaattgttgtttgtagaagattccagggtgcaatattgttcgaaattacaaacagaagggtaggttgcatggctaccgttatcagaggatgagtagtagtctaggttcccactttgcaggaagcaacatgaccccagattttgcacaggctcaatgccgaacctgctagagtcataggacattttatgtttctgagacatttgcatttgaaaagtaactggtactttgaatatatgcaaacaacaccaaaatgtttttctggtataaacactcctgaattttctgatttctctaattttttgaacaacaaacaacaggaacttctatttatggtctgtgatcgttgtccacattttactccaattccagctggacatgagcagtgttctcaaaatctaagatattctgcagaaagggtaacacaacagtttaagcaacaaacatagatagcaaaataatagaagctataaccatataaaacaaaaaggcagtctcagtcctgatggaataagaagcaggtagtattgaggctattgtctaaaattggtattctttgatgtcaggagttaatgaatatggaatatattactcaaataaaggctagaaaccaatatgaacagagttggattatttattgaaggcataagcaggcattttaaaactagaaaaacaaacttgtatacaacatattatatttttcagatttattatatgctattccaactaacagcacgccaaagagagtctgattttcataatccacatgaacagaatgtagttcttaacatccgaacaaaacagcaattttatcattttatttgaatctttttataatcagtctcttctttagcttttcactttccacatgttattgtttttgtttgtgctttcaaatttgatgcaatcaataaatggagattgacttgataaatataactagataatgaattttggagcacttgctgctacttaaagggagacctttttttttttgttttttttttgcttttttgttccctttatttgttcattaaaaaagtaaaaaaataggatcgttcagaaatgcctcccacatgctattcatgattttcaattccttaaaggaatactcataagattcattaatattttcttgaactcaaacttctttaaacatgctctaaacttcaactcaattacatagaaaggtgaatagggacttccaattataaactaaaaataaaaaataagcattcaaatacaaattcattcaaagttcaaacacactgagacacagaaattctgatcaatcaccctgttgattcaacaaaacctaaactgaaaagcaaaacaaaaaagtgaaaaataattactataaaccagaaagggatcaaccttggaagtaattgctcccggttaaacataccattgttaaaagttaatcagcaacccatttttacaagctcaataacttccataaaagtaactttttttcttctctgataaataaaacaagatgcagcatctccttcaacttcaacatgagcagcacaaacacttctataatctatatggtaaagaagtaaaaccacttccctcccacaacatcctcatacaaaacaagaaaagtagaaaacaagatcagcacaatattttcagactctcaccttaaatgaaaaggaaagcatgatctgaactttgaagccaaaacaatagagaactgatgcaacgaggaattggcatgcatgtgggcttttgtttttgtggttttattattcaaggttggaggcaaagaccaaatacaaggttgttgagtactatattttataggaacgcttacttaggcaatgcataagtcttgttctccccccagaaaattaccactaagcggattcaatcatgtttatctcccaaatttgtcctttactcgttgtcaataatcttataaagttaacttcgtgttatttctgttaatcacctcttaagcagttaagcattccatttttttcttcattttttttcaaaacataattttttacatgctcttttaacataaaagataaagaatatttttaacgcatcttaaaatcgttggttacaaaataaaatttaaatgttttactaaaatgaaaaaaaataataatattaataatgttaaatatttatattttttaaaatatgtaattggttagaactgaattagattcaaacattttaaacaaagtcttgagtttgagaatcaagtcttatgaataaagaaatacagattaagaaaagaaacttcattaaaaataattaactaatctttttgacaattattcataaactgataagcattaattaatgcctaataacaagtctgaaacctctatgttttatttggattccactgttccgaatacagacgcacgtgcatgacacgtaaacattaattagagtgcaagcaacgatctcagttatacgtcatctgataaaaaacgtgatttaactgtcaataagttaacttttaaacttaacaaatcgtatttgtaaaatagactcacgtgtgaaggagaagaaaaatcatgtaaggaatcaatatatgcatactttgatgagttaaaatgagtattttaaaccattttccagaaatttacgtagcggtgtcttacattttaatcttaattttaggaagaaaagtgattttttttcccatcgacatgaagatttttatttagtttagtcgtttgttgacgtctcttgttttggcgcgtgtaattgaaaaagaaaaaacaatgaagcaagtgtgtcggtaatggtatggtggttgataacattgcccccacacggtttttttttttttttttttcatttttagggatggaaattaggcattaattagtattttttttattgactatatttatctttcaccgtaaacaattcgagttacaataattatgaataacaaaaaatttccttaaactcaaatctgaattaattaaattgaaacaatcatatgtgaattgatgtaggccctcaatgataaaattaattagtataataccatcaataatctttcttctccccattttttatagatgcagatatgcgtcattataattgcaacaataagagcagtttttaattaaacacgacgcagtctagcatacgcaaccaaaacatgttgcgtatgctgcgtgagtaatggtggccgtcagatttattaataagggaaatgaatggataaaaatgcttgttgctaccggttgtgggagtacttaccaaaatgttatgcgcagaaggagttcacagacccatttggagaagatagaatgcgcttctcacaaaaaaagttcatttatttacataaaattatgaaatcttatatttatactatatatggatgatattgtaaagcaaattaattgtatctgatgttttttagattacaatattttataatttagtaaaaaattaaatgatacaattaaatttagtgacatttttttaaaaaaataatataaatttaattaggtaaatttattcagctttctattatattttgctttatttaattattcagttttttagtttatataatgttagattttccgtttataagtcataaaattataattttgtcatttatcgttaatgaaagtgcctacatgatatagagagacaaaaatgattgtcaacatggttgttgactaaattttgcactaaaatgtaataagttatcattggactaaaatattagtaattttcaattagaccaaaatgtcagtaatattccactgaactcaaatgtcaataatttttttggtaaaaaaggtcaatacctttcaatttgaccaaaatgttattaagagtaaatttttcctcttttttttatcattaaaacataataatgacaacacaataatcacttaaaaaataagaaattaagtataagttaaaagtagggatgaaaataagtcaggcctcctatgggacctttggtctgacttgtttattataaaggttaggctaaatttttttaaaaagtctatttaaataaaaaaaaagtcagacttaagcttttaaaaaattatgttagacctatcaagctggtctatttaatatatatatatatattaaaatttaaaaataatatatttatttttctaaaaaaatatttttccttattatgaaggtagatgatcaaccacttcaaaaaatcaccttgaaaatcttataaaatgattattactcatttaaaaatataagtaagatgttgagatattttctgtttaaaaattatttctttaactttcctaaaataaaatttcctaaaaaaatgtttcttcatgtttaagaaatggttggatataggaggagaatcatgaagaatggaatactttgattcaagactgaagcttttaacatgcttggatgccttgattagaagaaactagatgtaacttctgttgtgaagtgaaccggtataaattgcttgtatattgtttctcaatctctattactcttattgttcattgattatttgtttcatagttcaacaagtcctattttaagcaatttgattccaaagggctgaactatttgattgagtaaaaatatttcttagttttgaaagtgataaagatccttaaactctgatttgaattttttaaaataccaaggtttaatcaattcaccttccctcttgattattgtgagtattcccttgattcttatttcttatttattttgttatttaacattaagactagattgtaaaatgaaacttatgatattttatttagcttacttattttgtttataatattttgttgaatacttaaaaatgttctaattaattttaatttttttcacatacaaattaaaagggtggtatgtatctttatttatattacaccaattatgtgggattgatgtttattataattagtcttaatctattataatttgactaattattataatttggataaatttataatgattaatacattgttacaatgtttatttttgtatattggtaaatgtttattttggataatttctattatgacagacaaattatagttattaatcaatattatgattattattatgggataaaaatgataatttaccttaaaattatggttattagtgctctacatctttaggaacaaaaataattatctattctaaaattaattataaactttaacttgaaaacaacaacaataatattaatgtcttttaaatagaccaagttgttagacttaaaagaatttttaaatagtaaaagattgtcctttttaattaaatagactttaataaaaaaaattgttttgactcattttttgaaaattttggcctaaccaaagcctcctcaaatagactagtctatagattcctagtgagcaatttgatcaaaggatacataatctcttagcgttaaatgcgcaacatatgaaaagacttgataattaggaataaacgtgattgaaggatacaaagtaaatttgttgtctctcttatgaaaattcaagaatattattgtgacatgttgactaattagataaaaaataattaagtgaaaaaaatgagatgataaatttcaataattttttaaaaaataatacaaattattcacaatttcatactattaattcaattaattaagtttttcaaagttatcgtagttttgatattttatattaacagttaattattgtcaattttatattttaaaaaaaatatatacaaatttgacaaaagaaatgtacacgtagaagtagtggagttttcacaaatgacagtgtccagttatattatattaagactttttgattttttttttcttctccataatatctttattaactttaatcacattaaattaatttatttcaaaagtgtttgtgttgttataattaaaattttgtttaaatcaaatcacattttattaggataatagtaattatttaaaaaaattgcttgtaatctatttatgctcattaattgttaaattatattaattgtcagtagattaacatcaataatgtggtgtttggttccttgtaagttgtgcctacgtatgtgtcggtcatagttgcagacttgctgcgcatacaaggtcacatggagaatatttttagtaagtactcccacaaccggtaacaacaagcatttttatccattcatttcccttattaataaatctgacggccaccattactcacgcagcatacgcaacatgttttggttgcgtatgctagactgcgtcattaaacacaaacttgacgcgtttggcttcaaccctttcacgagcaatcacacccacatgcataaatgtatctttatcttcttaaagtacgttctgctgtgtttgtattgttcctttcgagtgttgcaaaaccaatttctttagatgctatccaattctggaagttgagttggaatttgaactaaactggtttcactttgttcttttctgtttgtttcaattcaacaccaacatgctgcacaccctgattgttcacgtcataaatcgtaatataggatgacatgaatttcttgtcagccatacgtcataaatttttggtggttactatttttcttcttcttttacttaaaaaaaaaaggaagaagaagccccatgaatgcgtttagaactatgattctgaaagtaaaaatagaaaatgttttataaaaatctttgttatattaaaattacaaatcatctaatattttttaaaaataattagaagcaattactagtaataaaaatgttttaaatactcaacaaacttgttaaaatgtcacattacaaatttgaatcctctctaataaactttcccgattcaaattactactatctagtacaaccatacattgcatttaagaggctagcgattggttagattgttttacgactaatcaattaatcgcaagattggtgcatgttaatggaagattgaccaatgttttgtgaattagtcaatcgacattaaaatttgtcagtattgaccaatataccaaaaacaattgaccaatttccattaacatggaccaattgggaccaattaatgtgcagcattagatgtaatattctactgtgatttgatggaggttgagctagagagagttggttgcaaagcaaaggatccgtttcatcacatcaccctttagaaagcgggaaagggacgcaataaagtagcataattttgtagttgaagtccatcaatactattaaatgcaatttaatagatagaaaattagaagtccaaaattgtggctgtgtactaattcaagcaccaagccaaggattcttaaatgcaaaactgcaaaaacaaaaacaaaatactactccctctatctctttgactatgagaaataattgtctaagttatgtttattaaaaaagtttaattaatttagttattaatattaagtttatctataattataatatttttttcaaatttatctttaactttattggaaatcgattaatctttctcaaatctctataggaaagagaaagagacaatccaggatattttagtaaaaaaataagaaatacacaagagaaataaaattaaatcttataataaaaataaaaatttgttaactatatctcataaataaaacaatatcttataattagagacacaaagaaatatattatttcagaatggagaaaaaataatcatcataatataaatttatcaacgtggcacttttttgtgtgtcagtaaagtcttaccttactgcaagatcatgtactcttcaaagtcaatatgataaagtcctaagataattatcaattatgtaagacaatacacctaaaagtagggacagtatacgaaggattaggttggaagatcttgttacagattcgtgtagactactttaggtagccaagcgtcatgtaacaattacgagtatgtgacatcagtaatgacatagttatagagaagaagatgatgaagatgaagaagaatcatggctgcctaatttgaaaagaatcttcttatatatggcgttggtattgatattgatataaaggatttaatacgaggtatattgtaattggaataaacgaatcaacctcaaaatgataaaatggccttgagagactttacaagaggcatctgtttttcaattctggattcgttcaacaactatcagtagcttgaaatagacggtaaaacttggagaatttgggcatgattggtgttaagaatatacattatttggaaaaagggataaggtcaaataaacatctgttctcaaacttgtaagatagtaacaagtagtaacacatttagtaacttctcacattttaaattttattaatcgcgtagttgcattaaaagttcttataaaatatattaagtctacaatgtatgcgacagaaaatgcaataatggcttgctcatgcttcccaagctaaattcactagtattggctttaaatccttgctctatcaatttaatgcatttactgcgtaagtaagccagtctgattacatcctatccatgtgaatattactgaaaattggagtcaattcaatcagaatcctagacacaggaacaacctacaatgaaaaaacagctagaaaaccaagcttctaccacttcaaaaaaaaacagtccaaatatcaagacttcacctttaaaatgcctccagtagcataaaaaataatagtttaatattggtaacaagctacatagttatgaaatcagccatcggatatatgtgcagcagcttgatcttatcacagaaggaagtcctcattcttatttttcatcattgatgcacccaaatcttttcctagggtgagtaatcaataaggtagcaaataccatttctctcaaaaaaggaattacaatgttttttataaattttttatttggtaatcatggcaaatggctttactatgttgtttacatttgtgtataatagagaatgttatcacaaacagaatctctgctaaaataaagttgtcattgttgaagtatgctttttagtacaatgctgtagaaattaaccggagaagaatcttttccaggattgccaaggaagaaacccacctgcgatatacagcacatgaaggactgtaaggtaatcaatttgacacgaataacttagttaaaagttgatcaacaaaacataaatgacaagaaaaatagggaaacaacaaagcaatgagaagtaacgttattggtacaggtcagactaatgatcataatttacgaagtttctaaattgatattatggttgtgaaatccagttattcctttctctttaaactttcagaataattaagggtttgaaacagaagttacatgagtgagaccaaccaatggtactttaattacactgctggagtggaattactaaagaaacgctagaattcaccatcatacacttgtcatagctcctcataaccaaaatgaaagaaactgtgaaccaaaaggaagaggatctatgaaaaatatctccttttcaacatcaaaatattctcaggttgacaatagatattcaaattagcttgggaatgcagggatttctgcaattcctaggtgttcaatgtacatccaaataatttataactacacacattcaagatactgaatttgatgttcaattactgagacatcagaaagccccataaatcaggaatatttcagagacatgcaataacattctcccagctgcatacttaattggttaaatagagtacatgatatgagaagaagaagtgaatgctatcataccacattctgggcaacggagatagtccttttccttttccctaagaacaagccctgaccctccacacacctcacatcttttttgagctaactgtaacattatccaacaatgaaggcatgaaacacacgggcttcataacttatgagttagcagctcaaccaaaagactgacttacaattcttttgttaaattcaatccctgccaccacaaaaggggtaaccccagctgcaaaattcaaacacacaaaatcaaaacccaatttcggaacaccgttctctttccataaagataagcacaaaatataactgcagtcttttggtgctgctctcaaatcagaattgaagtttcatctcgataacatgtttaatgcaaatctttattaagcagattattgataaaaaaaatctctaatttgatttaagaataacaatatcaaaaacacctaataaactgcatccaaagttttgtttgtcctataaaaacaaacatcacaagtaaagtaaaatatcaaaggttgtgctgtgtgacttaaggtacctatagctccaaccacaatttgccatgtgacttccactggggcagggtcaagtactgtggttacatcatcaacattcacaggcacagcagccacccttgttcttcttgcattcttaacacaaacattattacaacgttgtctttgttgagtcacatgacagttctgtgagactttgctcctagttttcacactccctaacgaaagcagagacaaagaagaagatgctgcttccatggtacggtaactaactgtccaagctcgttcatttcacacttcacaacaacctaaccgttataaataatgccacgtgggcttttttagcccacgggctcgcgccacctacgcgttacattgtgtgactcatgtttcagatatggttttaagtaaaaacgacaccgtttcagatagaaagataaacctctgggagtgcagagattctgattattagggttttggagtatattctttttctgtttctctctgcaacaatggcggctgttatgcctcactatccttataatccattgctatacttttcgactccttcgagtttttgttctcaattttggatttttgagagagagcgtttgggttctgcgaggttgaagaatttggtgaaacttgcagcacattccaatccgaggattctcaagagcaacaggaagtcaaagtatggagaggcactgtcgctgtacgatagcgacgaagacgatgaagagttggacgtcgacgacaacgaggacgacgatgatgattggctttctgatgtgagctttgtgatttcattgtgtgcggtcaaaagttttctttaaattctaggatgaatatctaattcaattgatgggtgaagtgggttttttaattatgcatttgaattgtttctttagtccaatgtaaaaaactgaggaatgtttaattatctgttgaaatttgatattgatgatgattgtttctttatttgttaattttccctttcattggggaacatgtgtgcaggaggaattttctgagcctgctaacttagatgttaataacatcaagagatttaagtcaaagacaactaaaggtatgcttgaaaatgttatattgattattagttttaaggggggaagttgaatattcagactcttgtttgtgcaggaaaagatagacaacaggaacaggagtggggtttgagatcttttgacaatgaacaaagcattagattgcctagaagtgagagagtggcatccttacaaagaaatgagagtggaaaggtaccaaatcgtgatacagtaagctgtgaactgtcaaattgtgccatttaatgtacttgtggtgctcttgaaccttatgtttatttatctttcttttttcaagttgcagcatagtagaaatgtaaaggataaaaaatatccgcggttgtccgaggagattcctttggatgtgaaatggttaccacttcttgattacttaagcacttttggaatgaaggaatcacactttgtccaaatgtatgagagacgcatgcaatcacttcaaattaatgtgtgttccgcacaggaaaggttagaatacttactgagtattggtgttaaacaaagagatgtaagaagaatccttttgaggcagccacaaattcttgagtatacagtggagaacaatttgaagtctcgtgttgctttcttgaggggcctgggcatacctaattctagaatagggcaaattgttgctgctgctccatccttgttttcttatagtgttgagaattcgttaaaacctacggttagttatttaattgaggaagttggtatcaaggaaaaagatttgggtaaggtcattcagcttagtccccagattcttgtgcagagaattgacatttcatggaatactcgttgtatgtttcttaccaaagagttgggtgcacccagagatagcattgtgaagatggtgacaaaacatccccaacttctccattacagcatagatgatggattacttccaagaataaatttcctaaggagcataggaatgaaaaattcagacattgtgaaagttttgactagcctaacacaggtcattttgcatgtatttccctcattattaatttatgaaaattatcctgttttactgttccaaatttcgattcctcctttccaatttatactgtttttgtaggatgccctacatttgcacaaatagaactaggaaaataatatattgttatatgacattgtcgtatatttttgtatattttggattcatacttataatgtgaagaacagtttgtatctcttgttaatgttgactactgtgcctgcaggtgctatctctgtccttggaggagaatctaaagcccaaatatttgtacttggttaatgaacttaacaatgaggtgcaatccttgaccaaatacccaatgtatcttagcttatctttagaccagagaattcgtcctcgtcataggttcttggtttccctaaagaaagctccaaaaggaccatttccacttggatctctagttccaactgatgaatgcttttgccaacagtgggctggaactagtttggataaatatttggcatttcgtcagagattgttacttaaaaagtttgctgagaaatatgaaagaaaaatgtgacagatcagaatcaagtttgtatctgtcaacttgcacgaatactggaaaaagaatctgttgtaatattattgtcatgcatcatgttgctataaaattttcgtgatggtctccattgtggctgaagctcaataattagagtttagttggctatttggcatactgtcatcacatgatttcatgacacactcaagtatcagtgtctgattctcagcagaagctgcccaactacttttgtgaagtttattattgctgtgcttgtggctgaaaagcagaacacatcatggtgcaatttgtcaccctaaggtgagctggtttgttagttaataattaatacattaagtatgctgttattaaccataagtctcttaacatatcgcaggttgtggaccatattgcaaacttttattggtataaattgaagaagctgtatcaattttaactctaagatccagcttatggattctgtcatcgctactctcatgtttcctttttacctacaacgatgtgtttgtgtagatatatctttttactgtttgcattcttttgtgtatctgagatcagtagggcttctgttacctttgtcaatgtcaccttcaccagaccaatacataattttttttttttcaccccgcggccatttgtatcacatgtatgagttgaaataacattcatattatcttcagtactagtaattgtattctatcttctggatttatttatttttggggagggggagggggttgcttggtttatgttgagttggtgtaatatatcactttcatctttcagtcgtgtattctcagaagaatgaataaaggaatttcttataatcaaacatgggtagattcaggttagagattgatatttttattatgataaaaacaaaggtatccgcatcattaactggatatggaagatactttttggatgattacagggaagaaatgacgagaaattattagcacatgcttggaaatggattaatgttttgaaattacgatttcacaggaatagcagatgatgcaatagacaggttaaaattaaggttcattacattaaacattgttttcaatataggtacacgttcaaataaattgccatccaaatattaacaaattaaaaattgttttctggctcgtataacttttgtcatgttgcttacaatggaatggacgatgatgctctggcaagctttatttaatgattatttccacatcaatgacgaaaagtgattttggttttttttttttttttttttaccatcttccaaactttatcttgcttgtggtataaagtttcatttgtgaattgagactaatattgttcgtatcatatatgcacaatgaataatggtctctgtataagcttcatacttctcatatattttactcgagttatcttcttggtcctgctagcctaaatcatgtaatacctcgcattcgttaagcatattttcacagcgaaaattacatgaagaaaattgaacagtaattgatgatgcaaaagcaagctaaaacaatcaagcttcttatctagcatttgcattataaacgataatatactttttctttttgagattatgtgggggaaacaaagtggtttaaagtgagaaaaattcaacctgtaaacatgacatcgttgaacaataattcaagattctattttagcacaactcattatatgtatttctagtttagtaacccatgacttgagttcgaatctaaaaacagtctctttacatatacaagaataagactgtataatatttctcccccttacctacacaggcgtgaaatctctgggtaatgaggtacgtagttttagtttttttttttaatggacttgcaataaaccattattaaagcagttcatattgagtaaattagttcctcaaaacatagactcgtattctaagagctccttcaatctaattaaaactttggacaataatatacctagttcttttcatccactaatgacttcatgaataaaactcaactatatgatctaaaattcaaacattttgccacctgtctgtaactaaaagctataaccttcttacatgtatcgtttaacttttgttattgccaccaattccaattgtgaagaggaaattcttcccgtgtctcttcttcagcatgtatgcactagctggaattttgactaaaattactgcactaattgagaaatatttccatagaagaactatattgtgtatgaaaagaaagctgcgaccattggcctgattctgtttggactctatatttcttgtatatgtatctgaaactatgactgtttacctcccactatctagtgaaaatgcgaatggactgtccgggagattgagtccttgattgctggataaaaattaaaaagtaaataaataacattatccatagtcaacaaaatatttcaggaaaagtatagcagcaaaactgcatgtttgcaaacaaataatatcatccacacagaaattgtaaacaagcagaggtaacttttactatgtctcatatttgctacttgacaaaacgaatggtgttctactacagccaagatcatgaaagaaaacttttagtgttttacaaatctcttttagtgttatacaaatcatgaaaggaactattgtttatggggtttaccggtttggctatggtatagagatatatcagaatggttacaatcaaatccttccatcatttctatttacataaaaccctcatatagttatttacaactcaaataactagaaatttaaaatgaatgagatagaaaatgacttcaaaggttcacaatacaaaatttgataaaatgtgtaacattttatagtgtacaatgttgaggtttcaaagacaaaaatttgggatcaaaagatgatttaaaataatgtctcaattgcttggtttgaaacaaaagatgatttaaaatggtttaatggatctggttcatagaaattttcaaagaaaagttgagaatttgagaattttagataaaaagaaaacttataggaaaggacttgattataataacaaaaaactgaaggactaaattcaataaaaaaattattaggggaacaaaatcccagcgaccatagtagtgaaacaaaaagtacaattaagcctagtgtacacaaaacaggtaggaagtagaatgtgagagggagagaagtctattggaaattgatgcatacctgtcctcatcagagtaattggagtctgtatgcatggatttggcatgcagtggaaaaccgaaagattcttgcgctggctggaaattgaagtgatctgcatgagaaattatttcaatcaatataactcagaatgatagttagaacatacagaaacttgataaatagaaatgtaaactatattatcacacaccatctgaaatccttgactcatccatggagaagccaaaatgaggtgaactggagaaagatttttgggcaaacggaagctgtgcaagacttctcctctgaagttccaggacttgctcctgctcttcctcttcaattagttgtggctgtctcctaatggatctatggttcccaaaacttcttggaactaaataaattataattatgcattagattgtacaaaggcttctcccacaaaagggaacagaaagaaagcagatcattaagtaacttggatgagaaaaccaatcattgggaagttaattgataaccataagaaataagaaatattttgggttgtaaactagataatgtcatacttgagttaagttcagtgtcgacatctacatggcgtggtgaataacaaacagggtgctcaattctatctgtgtacttcctgcatccaaattgaaatgcacactgaaattattatggggaaaagaagacattaacaatgccccaagagaattttaccgaaaggtatataagcagaagcacgtaagatttctttagatgtaaataccaattcaatatactacatttgtccatcttactttgcatttaaagaatagagagagacagagcagactagttttcacacttcaaacaatgcacttgctattcagtcacaggattgatttacttggttgtgtatgttgacaacaacattattgtattgtacatgtaaagcaacatctctttctacattttggacaatatcttggcaaggttaaatatttcttgggaatagaggtggcacaatccaagaatggtattgtcatttcccaaagaaagaatgcaatggatatattagaggagacaaattgatggatgctaaacctgtagacactcctatggatcctaatgccaagcttctaccatttagggtgagccattggttagaacttagaagactgaactaactcactatttctcatccatatatctcttttacagtcaatgtggtaagtcaaatacttaatcctccctgtgaaggacactggatgcagcaatttgcatcctacaatatattgaagaagctctaagaaaagttctcctgtaagacgacaaaatacagactagagttgtgggatattccattgcagattgagcaggctctccctacttatcacttatggcgcattcttattggtgataccatgatttcttggaaaaataagagtgttgttgccagatccaatgcataagcaaaatgttaagccatggccctagccacttgtgaactaatgtgactaaaatagatgctcaaagaattcaggtttggggaagttgcacaaatgacacatgtatgtgacaatcaggcagctccatattgcctaatatccaatatttcatgaggaccaaacacaattagttatatgtgataaacttggtgcctatgatttataaactatagctggatggacagtatgagagactatgtaaatatgttagaaattatgcaaatattgtatttagggaactgtgtgtatttatgtaaattagggtaaccattattttgtatttatgactcattataaataaaagattgtgtaaattagacacatggatttcatcctttgtctcttgacctctttttttcaataaatggaaaggggagaacaaggaggaagaactaagaacaagggaatcaagtaatcaacagcaaggaataaattttcatcaaattatgctaactctagcaatattgatgacaattatgtagtcatttcaaactaaaaaatataagcttttattttacaatattaacttaaaataactacatttacaggaataaatgagaatttcaaaccataaaactacaagaacttccaatataaaaaaaattgaaaggaaaagacagggaattcacctttcattaacctttgccttctcctggtaagctttcacaagcacccgagaatccccaacacaatggggattccccttatcaaaaacagttttgacagtttctgaatgaacaaatgtcacaaatccaaacatccttctctgctggtttggaattctgacttctgcaacaggtccaaatgtgctacaaaggaaatatataaaagtcagttcattaatgcaaataattaactgcaaagaaatgggaacatgcactttaacaacaaaagatgtaatatacttgaagtagtttgagacatcatcctctgtgaaagtgctgtcaggtgggaacgtcagatatatttgccgtgaagcactgatatttcgagcaaaatctcccttttgcatttgtgtgggagcatcttctgccagaaccactgaatgctgtccgtgaggtctgtaaattaaccacaagagaagccaaattagagtaagaaacatcaaacactaaataaataataaatgcaaaaaaaaaatcataagcctttacctgcctattagcctaatactattgttcagtcgtgcaagaagctttgtcaaactatagccagacttaccatgcctctggctctcagttaaataaccatctgcttgcagtacctttttatatttatcgtagtatgccattggcagggaagcaattgacattggaccgctttttgttcttaggagctcaataatttcagactctaactgtgccagtgaccccggggaaatcacctgatcctcactaatattgtcatttccatacatctgagagaatttctcagggacaacttgcccatgatagaatctgcagcaagttccatgcttacagaatcctttgttgaaatagtgacatatcttcaatggttcagaaaaccttctcccagcttttccacccaaattggcagcagaagcatctaagccatagtaatcattggcaatccctccagtcccagtttttacagcatctatttgattctccaaagtgagcatctgtgtctgcttctgaagttctacaatagaatccaagtaactagttcccataaagtttggattaacattgccagcagattgtggatcccaatagggaggaggcacctgaaagtttggtgaagtaggagttctaggggaaattactgataaatcacttaaaccttgctgagggtttacagtacgtgacattgcgagcatatctggtttagcatccaacctttggagttcctttctggcctgaactgccacttcacggatgaaatagtcagggtatgaagccaatttagccatttcttgttctccatggccttgaaagaagatataatcaattatctttctagcattctctgggtcaaatttctgaattttatcaaagactatacttgtgtagggagaatccataactcttatcttgttactgcaaaaagtccagcccgcgtaaacaaaatttagtgaatactgctcacaaaacaagcacaaagaaacacaacaaaaccacatctcaaagattcagcacaagacatacatagggtacaaaaaaaccagagtcccaatcttacaaaacaaaattgaaaacctaatataccataataaaattgactaaacaaccaaaaccaaaaaatagtgtacaaattctgaggaagagattccacaaatccaacagaagcaaaaaaaaaaaaaaaaaaaaaggtgatgctcttgtgcaaaaaggcgccctattccaagaatcaaatattataaaaagacctagcaagacaggacagagatgaagtcttagaataggaaaacactccacagtgcattatattttcctcaattttctgtcatcacccaaaaaggaagtaactttaatgcagcccagaaatgggtcttgctcctaatatggaaatgagcacgaaacacgctcagaaatatccacatgcattaatcacacacaccattagaaagtcgcaacagaacaaatggttacaagaaaacgaatcagcatttgcaaattaaaaaccgggcactgacatttcaacattggtgactaaaggtccaatttttttgcaaaacaaagaaaagttggtataatctcaaacgactatgtaaaccccaaagaaaaaaaaaagaacaaataaataaaaacaaaatcttcaaaagctgcatactcatcaaagagcaagagataaacagtgctgtaaatgtttcaagaatggaacttttttaacttttgctcattgaacaccaaactttttctaaccccaaagaataaaaaaagaacaaataaataaaaacaaaatcttcaaaagctgcatacccatcaaagagcaggagatgctgcaaatgtttcaagaataaactttttcaactttctttccacaccaaactttttctaaccccaaagaattaaaaaagaacaaataaattaaaacaaaattatagaaaatattagataatatatatttagtacttttattttgaatcattgttattataagatatatagtatttgacatcttaacttatttgttattataatcttaacttattttgaataattattattaaataaaatatatatatatatatatatattatttacagtagatacatcttatcttattttctattataattgatttcatataaacagtgatcctattatcaggaaataaaaatcaggaaataaaaaggtgcatatccatcaacgagaaggagataaacagtgctgcaaatgtttctaagaatgaaactttttcaacttttgatcattccacttcaaactttttcctactccaaagaataaaaaaaaagaacaaataaataaaaacaaaatcttcaaaagctacatacccatcaaataacaggatatacacaatgctgcaaatgtttcaagaatgaaacttttttcaacttttgctcattccacatcaaacttttttctcccagtacaataaccttcacgtacattcagagagctgtgacatcctaatccaaaaataaacagagtaatgcttttgaaaagactcagaatccagggagtagcaaagacaccatttatggttctctctcttcttttttgcaaaatcaaatatagtgacctctaacactttatattaaagtagtgactctgcaatttttatttcctttaaaatttaaaactttctagaaaattacggatgttgaatagtcagatacttaggcaaaatattttgcttaatattttaggactaaaactgcttggaactaccccaattactagaatcggctttttcatcagatgaggacttttatttttttcttaattaggagtgtgttttaaaaaaattatcaaataagataagtcatatcacgtttcgtatcatatcatgaggcacgatttctatttttttttaaaatatatatttaaatattatgtcatgtaacacgatttctgaatgaaaatttaaaaaacaaatattttattttaaaaaaaatgaaatcgtatcttgacactatttatccctatttgataattaagagaagaaaaaaaagcctccattcgataaaaaagcctactagaatcaaccttttttttcacaaaataaaaataataattcggaaaatccaacgtgctgaatttagtacttcaactcttcaactgcacaacaaggtcggcaagttttgtcatgcgtatatcctaagttttgagtcacacaaggtgggttttacttcttcttcttttttttctttttttttttctctatagttaagagtttagttttctttgatattcaatttaatgatcattaaattgaaaaaaaaaatcattaaggaattaaaaaatagataaagatatagacccaagttgaatgtgtgccattggataagatccttgagattcagaaactcaaatcttgtaaagcggggaccaagggagggaaaatacaggccttgcaaagaggctaaggattaaagggttggttgtggtgaaagaatggaacaaacattttacatttcaatttgtttgggagggaacacaacacaaccatagataggacaatgccacatcttctttaaatataaaaaaagttcataaataaatcaatgtcacacaccaacttggttaaaggtccacaccatgtatgcacacagcacactcattgagttgtgttctgtgatgttaaacggaggcccctcgaatttctgggaggacccacaacatccccaagagttttattttatgatcttgttcatgcagttttggcacttcatttttatattcgttatatatttagtttgaccctacctcagggaggggtatcaaatgaaaggcaacaattccataatcttatcctttcgggtggtcaaactcaaaccttgatttgtggccaatgctcgatcgaagtggtttttgttaggcttaattgtgattttagttctcccctttttagtttatgtatgtatgattttagttttttaattttaatttttcatatttaatttttatagttttctaattgtttgaataggtttattattctaaattttcatttaatatttcatacaaatgtgatatgagtgtgatctattgttgatttgtacaagaaaaatatataaaataattaagtgaaaataaataaataaatagtttgtgtacaatttatttgttatttaaaaatttaatttttttgttttatataaatcaattatacgtcatacctttgaattgatacatttatgtaaattaatagatataattttgaggtaaagacacttaatttcaataattaaaaaactgaaagtgaataattaaaactaaagaaatcaaaatcccgtatccctaaaatatttgaccaaaagtataattaggttatttaggtactattaagatgatttttagttttgagtttcaatttttttttaaaattacaatcaatttttagttttagttttttaaaaaaataaatcaattcttaaaatataactagtttcaaataatttcatttaaaatatttcttatcatattaaaattaatttaagaatgtttttgtatggtggtgacaacaatgatgatgtcagtgatgataatgataccaggtcatggtggcagtaccaatagtggtgacggtggtggtggtggtagaggtgacattggtcgtggtggaagattggcaatgacaacatggtggtgatagtagtattggtggtgacaacaactataacgaaaatggtattagtggtagtgacaacgaaagtagtagtagaaatgtcaatggtgtcggtgatgatagcggtgttggtggtggcagtgagtggtggcgatgtggtggtggtggtggttgcagtgacgttgatgatggggtggggaccgtacaatgatggaggtagtgatggtggtagtaacaatgacgataagagtgacaaggacattgatgttggtggtagtggtggcggcaatgatgttggtgggatagtggtggtgttgaattgtgaaatttaaattggcaacaagtggtgatgatggtagtggttgcgacaacattggtggtgagggtggtggcgagatacgatgacaaatatggtagtggtggtggtgatgacaatgatagtagttatgatgatgacattgatagtgatggtggtaatgatgttggtgacgacgatggtgacaatgacaatgatgatggtgataatattgttagtgatcgtggtggtgatagtcaattatagtagtgacaacaatggtaataatggtggcggtgtcaatagcaatcaatgacaatagtgataatggtattgacaacaaaaagtgtcatttacaaatgtgaaaaatgtgtgttttgtttttaaattaaaaatcaaattcactaaacgtttttcttagtttaaaaaaagtgaaaaaatatataaaacatgtattaaaaatcattaccgctccaaagagacgcttaatttttatatagagatcaagtgttttacttgtcaaatataatcgtgagtttgttctacaaagtcgcctgaatattcttttcaattataacaagtttattttgtttagcttgatatatagtgcgttagctttgataatattctgtataatgttgttatccatttagctttctttatgggatggcataacttttatagatttaatggaagaaattgaacttatcgatgataatccaacataatatttgctcagtgggaatataatgggtcagagggatttataattgcggtggattggagagtgcttcaacaatttagtgatggaggagttgaataattgtttagagagaaatgagtggtgacttgcaaatactaagacactctagtaagctatatgtttaatgtgggtgtgtagaagcttaatgagggagagatctaatgatgttatatagtctaaatgtgacgaaatatatagagtagagagagaaaataaagagtggcttaattagcaatttaattgggaaatattttaattttcgggtgagttgtatcttcaaaacacaatttgtataattagagttgtgcaattataatatcccataatataaatttgtcaaaattatatgaatatcttgccatcttaattgctttaggtatttttttactattttcgttagaaagataaaggtagtagcagtagtcattattatctctctctgtaaagttgccatcactatatccttattgtctactttgtctacttttatttgaacgagtctttagtgattttttcgaagaccaaaaaagaaaaaagaaaaattctactactactttaacagcaatactaaaaatgtggttgcaaacaagatgagagacattaacggtacatacatattaatggttccgttacgtcacaacctttccctgccccaatgtttcaaacacacccagtcttcatacacaagctacgtatacctatggccaaccttgtctacttgactaaaatattttggaaaaatggtccaaaaacacgtgctgccagtgatgtataatgtgcgtgtagtgaacatttttaggattcaaataatgcacaaatgttcttactgatccaatcaagtttgtaggttcgtaaggaattttattcaaagaatttcgtgtattgtactttggcttttgatcacatggtccttttccagcgttgtcgtggtcatatttttcacaaccatgatagcaccgaataagtgaccaagcatgtcaacttaaaagagggaattatgaatgaaagaaattaaaatgcatgccaataaagggagagtgactctcttgaatgaatcttcttgtcatgatgtgtatatatgtcactaaggttacagctgaattgcacccatttttctggaataaatcccaagatctgcaaatggagcagttaattaggatgcaaattaattgtagctagactagaaaaccacaacacctaattgtgtgtttgggtttctcttttcttggattacagcttatcttgcaaaattaagcccaaaactgattaaaaccacgggagaggattaaaaaaaatctctatcacattcattttatatttcttgggtaatatattattggtgtgaagtatttattaaatttactggtgattaatttacatcaaaaatttgactgatcacttttagtgagatttctcttctcaattacaacttttttttttcataaactagaatcaatcggacaatgactttttggtacattcattttatattatttgatttctctaagttttttctctttagtatttgattttttttacgatggtgtggactatagatgagaatattttcggaccactttgggctgcataaaaaaacaggttaggagtttaaatttctacactattcatttttccaatacacccaacatgaacagtataataccaattttacccttctcataatccgtaagttgcataccaacatacaccattcgatttcatacggatcgacaatccgtaagagtcatacggatcgacaatccgtatgaggcatatggattgtcaatccatatgactcatacagatcgacaatccgcaagagtcatatggattgacaatccatatgcctcatacggattgttgatccgtaagagtcatatggattgacaatccatatgactcttgcagatcaacaatccgtatgagggtaaaattggaaataaaaaaatatgctgggtgtattagaaaaagagctagtgtagaaatggaccttctttcaactttagttaagttccaaatttgtcaaactttgtttatgaattatcataatacgaatggaccttctttaaactttgagaactgatgtagtttagtttagccccatttattctcaattttatttctcataggttaagtcaattataattagcataagattctgatatatattatcagattttaatcgaattcaaatcaaatctaaataaaacaatattatcaaattatccgtttctcataaaatctttcaaacatagccccttgaaggctttttgctttggtagtagaaaacaaatttaggaagaagatgaagaaaaaaaaaaagaaacaatgaataatatatgaaatttaggatttacagctactactgtgagaaagggctctggtgcatcatcataaagtggatagttgaactggtttcaccatatgtttttcgggttttttcttactatatgttgactggaatgggctccgaaatgcaaagtgtgggatgaatgcagttgaatctggaaggaagccttgtgatcttgctaaagaagctcttcatgaacaccctttaattccatttacacttagcaaagctataattgttggatacttgggaatattttctatctattggatattttgcttcttgagattctttgttcaactaaaggatactttggatatccgatagttttactacaataagtaagtattggatgataaacatttgaaatgtattgaattcgaagggattgataaattttgcatgactcaagtctttttgccataatttacctttgatctattatggggaaagaaactgatcgagattacaagtcacaacaatcttctccaacccttgttgagcagaaagaatgtaggacacataaagatttcagctgagcaagaggtaccacagaggaacgtaacatatgccaccaattaatggcaatatggcccaattattgcagaaaacaaattagaataacgataaggtgttttttgctcaatgattagaggtgattataaaatataacttggagaattatctgcactcgtagaaaaaaaatttggcctagacaacagtcagtcataaactgttgtcaacttgtgttgctctgacccatctaattttaatgtttccttttaatcataggctacaaaaaaaaaaagatgagattatttccctgcccaaatctccccaaaacacacgagaaatatttaaagatatataaaaaaatagcaattacaaagaaacatatagtcaatgatgccataatctagttcaaatagatcatattgatcagcttaaattaggatgaattgtatactgtaccaaaaaacactcccaatccacacctaggtaaataattaaaaaggagtgtttactggccttaataaacctccaatggtactttcaattaattaatttatctgtcaacttgctccctatattgcttcttcaagagatgctcgaatggtttcagggctcaacattttatttatgctaccaaaaacacataaaacaatggatatggtaaggcacatagttaaaatagtaaattcaaaatagagaacacgcttaaaccaaaggaacttacaatattagcaaatccccgctagagacctgcttctcagaaatccattctggtgctagttcttgcaacaaatttagctgctcttcaacttcacctgcgaatacaaaccagaaaattttggtgttcagaaaactataaaatagtaaatcatttttgcataaatccgtgtcttacttctgtcagcaatatcacatcgacttgagattatcttgcttacaagctctgctttagtgataaaattccgctgtcgaagtaacccacgaatcatgtcaaagagcttagggaggctagctacatttttcactggagtgtcaaatttcaatgaccttgcgcaaggtgaacgccgagctaacttgttcaaaaaactgatagagtggtcatctgggctcatacgacgtcttttgggtgaccgcaaggcaggtgtggcactcatcgacctaattggagttgaaatgtgatgaatgatcttgagagacccgtctttgttttccgcgtgtcctcagtggtttaaaaagtctggcttagtctactagtatataagtgtcctttacattaaatattatatattaaaaacaaattatctttttaaatagattagattttatattatattattatatttctttttttaaaacaaaacgtaacagcatttgctttttttataatctacaaacctacacataaattatcttttttatcttttatcttttttagtagattagattttatattatattattttatttctctttttaaaacaaacataacagtttttatttttttattatttacaaacttacacataaattatcttttttatattttatctttttaaatagattagattagattatattattttatttctctttgtaaaacaatataacaaattttacttttttataatttacaaacctacacacaaattatcttttttatattttatctttttagatagattagattttatattatattatattatttttctttttaaaagattgatttatatcattttaattttaatatatatatatacttttattttttttataaaatctattataatgtttcaaatcttctattttatttttatcttttaaatagattaagttatttagattttattttatttattttttaaaagattttccttctcctgcaatttcggaatctccaaacgtgtatcaatattgtttctttttttaaaaagcctaaacgtgtacatgttgaatgaattgatagcttatgccgtggagggttaagttcaattccctcagttgtagtttcttctgttttcctttatcttttcttttctccacttaaccaagaaaaatgatttttatagctcgagcatcattagcaagggaattaaattatgtcttcttcgaatttaatttaaaaacgcacacatatttaaaggtaaataaaaattagagaagcaaaattcactatgcttgtacacatttatacattttgaggaaaacattgaaacaactaagaacctttcatactggctaaatttgcttttaaaggtgtcaaacgaaattttgtggaaaaaaaaaacatgtttggttgttgtttcctggctcgatctgtttgccccctaaaggtacatttgactacgttatgttaagaattttatattaagttccgtttcaaatttacttttaaaataaaaatattcaaacaaataacatcataatgaaaaaacaatgctattttataatatatttttatacaaaaatgtgttccttgaatattttataaataaagaattacaagcgggagttaagagtaaaataggattacttcaaaaaaagaagagagtaaaataggattgaataaagtacaaatttgaagttcactaattgataaggattaaaatttggtgtagagataaaaacatctatttccaactggttaatctggtgacagattatttcccagtgataggaagtgaaagttgtttctaattaattccattaaatttgtgaagaaacacaagtaaatttctgtgtttcagcagtgctaagctagtgtgtgtgtgtgtgtatgagagggggttggaaaaaatggtcattgttttgatcaaacctgacatctttattacaccaaagccttaaagactttcgttagcaaagactcctctcattcgtcttttgcaaggttttacatgcttgaactcattgcttctcattttgtacatgtatcataatttttccatcttataggctgttgcaaaaatggcacaaaagcatgccaggtataaagaaaggagaaaaatatgaagaacgaacaaacttaacctctgttagaattttcctgatcaactaaatattcactaggaatgtcatcctgtggtctctttgcaaatgtatctccgtcatattctgcatcattctccgagttctcatcactgctccattttcttttcatgattttggggaccatgcgagttactttagtctccaacatttcatcattattatttttgcgttcaaaccgaacagcgctcacctttctggcatttccagctagtatctgcaccaaagacaaagaagctgcgtgttttctattccaaagacaaaggggatgggggaggctaaggagaagttctagattcagtttattacttcatacagattgccaaaaataaaaacattttaatttgaaaccctataaatgtggctcacacaagttaaaaaataaaggattatgcaaaatataattccaatctcgtgacaacatagaaccctacaaaatggaaaagctgtagaattgaaagggtacaatataccgagtcctctgacattgcttcactaaccatatgttcaaaaagcagaaatcaaagcacaaacttgttgaacaagctttttgaggaaaatcacattgacatctttagtgtagcttgagtaaccgtagagtaataaaactaaaaagtggtacatgcaacttatgcaagtatgctgtagttgtgttatgctatcattattcattatacttgctgatgtaatttatgtgcaaagtgctaaccatccattctcttcaactttggactgtatatgcaaaaatcaataggactaccttgagtggcaatttaagatagcaacagattgattacctcaagtttgaaaatctggttcttctccttctgatcctgctggtcagcattggactcattgttatcatcttcatcttccctttcaagaactactttgatgcactcacctgtccttggaatgtatccaaatgcttcacacacaaagcctgataccgtctcatattggtgaccctgaaatagatgtcacctacgtatcaggaggcctgaaattcttcatcagacttagcaatatgaattgtaagcaaaattaattcaaatgagatcattgtttgtctcttatattcttagaatatatgagtttgggtctaactcaacctcaaaaagctagcttaaggggtgagggttgtccctcacttatatactctatcttgactttatctttagttgacgtgggacttgggtttttttaaatacacctcctcgtcagcacttttgggtttggtgcgtggataacatggtggttgaccctttgaatgaaatcttggatatgctctgataccatcttagattcttagaatgtgagtttggacctaactcaaccccaaaagctagctcaagggatgagggttgtccttcacttatatactctatcttggctttatttttagtcgatgtgggacttggatttttcccaatgctgtcaactcaaatctaaaccccaggattcatgaaacccaattgttatcagcataaatttctccaaaaatataatgcagttgcacattttcccaatttagtccacaacttgtgtagaaataacaagcaagcataagaaatgtgttggcatgatgcctatttgaaatccaatggagtgaatgcctatttgagatgcaaagatgggtctagcctatttgagatgcaaagatgggtctacaaagactctgaagggcaaattcatgaacaacttaattattgctatactactaattgtgatcttggattttttccccttttaaggataaactgactagatagtgcaactaagaaagtcacactagctccagtcaaataagcagggtcatgagaagacaaatatgtcagttgcatgtaaaaaaagggctaaacctctggcatcttgatgttcaaatcttcagagagctgatcaatggaagtgtttgcatccacatcaaaaacaccctcagctcgcattactatgtagccagtttttttctgtatctcctcctgtagaccaggacagaatgtaaaaacgttctttaatgaaaaattagcaaacaaatagttatagtcatcaacaatcaaatgcataattaggtgataatcgctaaattcaaagtgcattaatgtcctactgctgttagagacaatgacttgaacagttaaacattaagagtaagcaatgtacactaaacttataggaatgataaaattgaacaaaatgtataattttgttttttcttcctggcagaacttgcactctgcctactgagggtatcctgacacgaataatatactaaatgaaattatttaacacaatcaaatctagagtgaccacttacaactcccaaaaacagatgtttttgctgcattttgtttatcaaaaaggttattattcagcatacaaatcattttaaatcagttacccagaaattatgtgtagaatactagcaacctcagaatcaaacctagcttaaattgtatactgatctctgttttgctaacaaagttgaattctatcttgacatcttcccagaacccttcttgcacttacatgcattattatcacgtttacacatcattactagttaccctctcatttactttaatttcgtactcacaaatttacactatgatgctttggagagtttgtatttgaacattgaatatggccaagaacaatttatttacttttatttatttttaccacacaagaattcgtagttatgaaataacatcataaacccatcattcctcaaataaacacggatccatctcaatagtttgacctctttacttctggaaattctgttaatttatataaagttcgttcatgttgtattacttgaaaaaacgtgaaattttttaactgctttgaattatagcaatctgaagccatgaaaatagatagcctaaaacacaagctggacttttagcaaagcaccactagtagccattaaacagtagatttgtcagcatctaaattgttgatagttataagacaataaaaataactgagaaaggtatacaaagattatgcagtcagcacaaataaatattccatacaaaactgttgttgaacaaagagtgaagaataaaaaggatcctttgtttcttttttttggtgaaacagagtaaagatgaaggaattcaatatatgcttcactttcagttatttaaaaatatatttaaaagaaacaaagtaaagattaagcacaagcatttacctttgagtcattttcatcaaagatttcaccaacaatttcctcaacaacgtcttcgagagttacaatctgttagatggaaatatcaataagacatctatatttgataaactgaaaattgttagaacttataagcagattacatggaatggatttcagaagagttggagagtctagttacaatctaataaagtgttcgaagaactaaacctctctctcgatttagctatcaataaaagagatttatgtctacacccagtctttgctaaatgcaacaggtgtgtggaagggtggaccataaaatcatttaaaaacgaactcagaatcgaagaaacactgccattagatattcaaacttaattgtaacaagaacaaggaaagataaaggcaagtggaagatgagaatagtgggtaaataagaacatttagtaaatcagaatagcctgccttgtaaccagaaagacttttggttttattacaatgattttggatctgtaaagtaagagaaaaaataattaaattatattagagcacaagacacagcgtatggtacaacatattacaagagtacagctgtagcacagttagacatgtataaaaactaatatttctacaggattatttatgaatattcttgcaatagttcatgatgacgggaatgatctcaatgttgattctgtttgcttttatttcaaattagcataaaaaagaggttgataaacaattggaaaagattttgaaagaaactaaaggaataggaatagcatgttcaaattgatatctttcatatacttctttttgggtcaatggttgtaattagcagtgtatatatcaccagtgaatcataaatttacagatttatattcacatttatgtcagacaaaaagatccgagttggttgtattctggactggtgtgcacatacccccacagttccaccatactcattaagaacaaccgccatgtgaaccttcctgattctgaactctctaagaagattccaaacagacattgaatctgcaaatcgtaataataatttattaacattctgcaccaagttaaaagatatagatgtattcctatcccagacaaatcaaccagtttaacaattcaatttcaataggaggagaaaatcagggattgtgatcattaagttcagtcaagacatagcaagtcagctgctgcttaattctttgtccatacattaaggaataattcatcataaaatactagcacatgtccgaaagccaaattgttgaacattcccctgctacccttccaattggtgtgtttgtattataagtttatgacagggaattaaagatattacgaaatttatcaatgaaaaaaagatatcttgatgaagcaaagatagcatattagcatgtttaaattttaaaagaaatgctgaattggtcagaatgacaattcagagcctccagaatctattctgaaaatgcactgaaatatatggagcaacacaatcaacacagcagagatgacaatgcaatgggtgaataaaaaacttgctttaatgcaccagcaatttagattaacaaaatgctaaatgtaaaaaaagtctgacaatagatctaatagagtattgcttcttttttgttgttcctcacctagcatagctggcccaattatagacatcaggtaaaataaataatgttttatatgtactgtggctacattgcattgcatgaatacgggtgaacataggtaatctcaagatgaatgatgaaaaaaattaccaggtacaaaataagcaggcttgtgagccatatctccaactgtagtactttctagcaactcacccttcaaaatcaaacagattataattctacagactatgagattgggggatataattaataagtaaagcacttgtaactcaataaacatgatgagtaaaatctcctaaccttttgaacataatccagcagatccattgcatatgcgatacccattatattatcaacacgttgctcaaaaacaggtactctaggaaacacgtcaagatctagttagcacattggaaaattaaaatcactgtaaatttgaaatcaggaaatcttcaaataccttgagtactgatgagtgacccacaagtgatgaaagtctaccaggcttgaacttgcatcaattgcaacaacatcaacaagaggtgtcataacctctctgacatgtgtgtcttttatctctaacacattttcaatcatatcctgtaatatattatatatatgtgagatgcttaaattttaacagacaaataaaaatggattaaaatatctataacaatcaatgaagataaggcttttgcaagtgttataaagaagcatgacaatagagtaacatacatcattattagaaaatatgatgggggctcatttccatatgaaaacttgaaaatttatttatgctaatttattgattccttttcactactggaatccgagacaaaaatatttacatacaacattttttagaacaaacctattgatgcttagaatttagaatcaaatgcaagtctcaagactcctttcccctagcttgcttgtattggaaaaaaagttttttattttttattttttataaaaaacgtaatacaatatttcatttcaaatgttatcaaaataaacaaaattattacttgttacctattatctttttccttacaacataaaaactcaaattgaattgtcgtaattttcgaagaaaacatcaatcaatgtttaattcaaatctcaattcaaaaatggattttgaattattaatttctatattttttccttaaaagattagttctagcggttttttcaaatattacaaagtataaacttaaaacggaccaataacgaaattcctagtgaaaaagaaactttttttaattcatatcactcaataataattttttttttcaaaaacattagttcatttttttaaaactaatttagcatttttattacaataaacaatattgatgttctgaaatctttataaaaaggaatttttattttctataaatgacagaaaaggctaaacattttgaagacaaatatataatgatattattagaaaattaaacccaatattcattacctgttcttcctcctctattgccccacttaattctgcacctcttagcatcaattttagctcatcttcagttacatatggctcactggtaaagtaagcaatgacttcagtgttgaatttcaaaaaaatcaacaagaatatgtccaacaaccattgcttcaacaaacggatgccactttccacatgatttacatactaagttggcaaaccacagttgctctttcaaaccagggttcaacaatacataaagggaaggaaaaaaaacagttactgccttgtgctacattattcgaccaaattagaaaccaaaaaacagaagaactgttatcaaccatctaccacatataaacccctcataattaataaaataatctcatttccccatttgttctctttatcataacatttaggaaaaactcaaccttaggaaatgaacagttatcatggagcatgggtgaaaataaaagagcaccatccttaagatgaaggaactaagatttagttagtatcagattaaaattagatttcacaaaacatctataaagaagcaaaagaaatagatataatatgataaaagaagattagtctctggcaatcttttcaacagaccttattccttttaggccaagcaatttcagcatccccattgaaagataagtaacaattcttcctacaggatacaacaccagggaaagccatgccactggcctgacctagaggcattaggatcaatatcaatatttgttacaaaagaagttgaggcagaaatatcatgtaaatatgaatgatatgtgaaaaaataaacaaaaatgactaatcagcagcaccatttctgttcccaaatattataaaagaacaggcaataaattaaaaacttaccacaaaccgagccacttctgtggcgttatgaacagctatgctttttggagtgatttcagtgagaagcaaaatggcaaccttgtttgattacaaagagaaaagagaaatcagatatatgaggaaaaaaattatataacttgcacaatgcactgttttgtgatcaatttgatgcaatctatctgattgaaaagataatttataatactattgtaaatcctataacaaaacaacgaaaaatataacataaaataagacaggtatatcctataatgttgtctaaacttctgtctatggacagcttttaattcaaataacagatcccccccccccccgcttctatcttactcaaaagttagctaaggcacctttttcacaaattggtgataaagctagcaagctttacatgtaaaattcttgttcccaacacatcaggagtttgcaagtttaatgggcagcatgttgatatactgaaagattcaatgttccaaatgaataataatcaagtggcctagtgcatctgaattttagataatcaaatcaatgcataagccctttaagcatcttttgatgtcctagaaacagtagattttttttaacatttgagcaagaaaatcaaaacatacagtcatcactcctgttgctgcactgacaccagcttcaccaaacatagcagttgctgcttcagtgaccagagcagttgccccaatattgaccaccctgcatacaacaaaatactagcatgagaaacattctaaactgaaaaaaaataggacgtttttcaataataagatcaatgccaggagaatacgttgtgccaataagtattgttgtaaggaaccgagtaacatcacttcggagtagtctgaagacgccattttcagactccttttcggccaactcacgaaccttacacattgtcatcaacagatattagaattcaatgttcaaactttaatcagctaaattaatcatagtgaataacaaatctgatgtgcaaaaatctgcaagcatgtcaaaagaacaaaaaacatttttgaaaagaaaaggaaatataatagactagtagttgatccttaaatcaacagcacttaatttccttactaacatatacatcagttatgaaatccctaacttttagtcattcataaattctgcataattagcacaagaaatcttggtgttgcactcaggtagatggcagatgaatttctggtcagtatgatctcatgcaagatccaaacttcatttcttcaaaaatgagaaactttcagcaattggatatcaaaacaaatttcaccgtcagcaatgtccccatccaatcaaggctggcaacaatcctttggtcaacttccatataattatttaataggtctatactgaataatggcggtacaaaaaagagtttttgtttcctaggcatagctcctactttcatgtaacataaattatcattcagaaaaaggaggataacataaacaagatagataccttccaaggccaaagtgtagtgattgaagtctctgccatcgagaaaaaagctgaaaggcccaaaagcactgccaacaccaaaccttgctccttaaatatacaaagaacttgcaacactttaggccatgtattcctaagcaaaagaatgctctgtccaaaaacaccatatcctgcattcgcaaccccttcaacggcaaaaactcgtgaacatccaaacaccaataccccacaaacagttgcagccaggatgactcccctctttaacaattcctgtataaagttcaaattggctttggaaacggcatttttatcgctcaaacaatcgctgcaactacctaaacacctcaaccgagttctatctagtaacttggcatctgctccaaaacttgaagcctgaagcattgtaaaagtagatggagcaacacaattgggcacaaagggaaatgggtatctagtggttctacccaaaactttgattggtaagctctttcgccgattttcatgcgcagggcaaaacaatctggaactggaggtgaacacttggtgactgagaacccaagattcgagtgccataatcactcataacagaacaaaaacacccaccaattcaaaatcaaaatttgatgcaaagaactgtaaatgaactcaattaaactgagaaagcagttgtattttgcttagtaatcaaatgggtatcacagagtggtaaaagaataggttgtgttatgcaacacaggaaggggcacatcaaaaaagaaaagaaaaaaaacgtatatgcaccaaataatttatattttggggtgtctgggaatcaaaaattgcaaatgtgaaacggagaattggagtaaaattagggttttgaagggaatcgtggaaactggaagaggtggcgcgtgcattggtaggacttgctcgatcctacttgccagatcccaggttcggcgcaacaagtgggttgtattttattttcaattttatattttatattcaactatttcaatttttttcttaaatatattttaggtggatcataaattagtgaattttattttttgatttttaattaaatttttttatgaatacctaatcaaattattattattattatgttttaattttttaatatatctatttttattcttaaaatatataaatcatttattataaatttttctataaaatattttgcaaaattaccaataaattaggctttaatgtttctccttcaattttcattaacctattgtttgtttaaggcgaaataggatacaacgaattaaggagaaaatggaagttattaaccttctatgcttgtttatcatttttgtttcttttagaagatgtttcttcatcattaaataaaaaggaagtaaagaactttttttggatcctacgagaaaattgtttccatccctagagataaaattggttcatatgtaggcatgaaacttttttaaaaataaataaataaattttataacaattttttttaaagttattttatagttagattcacttgtaacattcatccaaacaacatatcttttatatcctattttgctttttattttttccttgttatttttctctctctatttaactcctaatacaaacaatgaataaaggtgataatataggttaggtatcaacatgatagaactaatttgatgaaatgtggacttgtgctttaaactttgatgaaatgtggactcataattcaacttacctaaactctttaataaaaaaaaagtaactagtaatttataatattgatatttcatattaatattttataatctaaacaaaataataataaacagtaaagtatatagagattgaaaaaaccaattctatatttttatatagaaatataagttttctagaaacataaaattcaatgtgtagataatattctatatttaaactttgttttcttaatagcattccattttataacatttgatttttatttgatttgtgttatttttcctacaaaatagcaagttcttccgatataaacatgtgtgacctaaaaatgcatttcaaaggaagaacgagggagagggaccaatgagatttgagagtgttcaccttataaaatgtgttggcatcgttaaaaacgtcagtataaatgatcatttatgaaatattatttgctgttaataaaaataaacatgttaacgaaataattaatgagattggtatcattcacacaaagtaaatattcataaacaaaatgggatcaattaattaacatactttattaagcattcatttagtaaataaatgaaaaattactgttaagtaaaatttaaatttatataacagagatgactttaaacctacatttacaatataatttttttatataatcatctaatcacaatttattatatatataaatttattaattttaaaaataattattaaaaataattaagacgatactttataattaaattacaacataaatcgtgaatacacattcaactattttaatatatgtacactgagcacaaacttgctagatttatatatcttagaaatagttttacaaattcacgacaataaaaacagaggaaaagaaaacgcattaactatgacagcagcttgagctgatttattcttccatgagtcttatacaacgtgttccttttcaccttctgattaagttaaggtccaacctttctcacaatccattgaggctttcctattaacaacacaaagcatcccatgcccactccaaataccattccacatccatatcctatggccactggttgccaaccaaatccaaatttctcttctctccaaagggtctgtgaaggtggagaattttgttcagggtccttactgcatttccttgacaatgggactccacataaccccaagtttccctcataggaatcatttgaaaaagtattgaactgttttccttgaggtatttctcccacaagatagttatgggaaagattaaggaaggagagaaagttcagattggttaattctgtaggtatcctaccattgagcatatttgaagagagatccaatgattccaagtttgtcaaatttcccatggattggggaataagaccactaagtctgttatgggaaaggttgagccctttgagtgcatgaagctctccaataacatttggaatctctccttcaaatttgtttcctgataaatcaatgcttacaaagtttgttggaatttttgtaagtggcatactcatgcctttcattgttacagtcacagacgaagcgtatgttccaagactaaattgcgtttgcatgtattgctgtgaactgctatccacttcatcttgaatgatattcttcatggcttcaaaattttgtatgtaggcttttggtattgggccgctgaagttgttggatgagatatcaaaaacaattaaactgggaaatccatggttggccttaaaactggcaatgagaccgtgaaacttgttggcccgcaaaaccaatactttcaaatgtggtagtttttgaagccaacggggaaatttatcctctatttgattgttgccaagatttaaaacctccagtagtgtgcagttggacaaagattctggcaaaataccttctaattggttatcattgagattcagcgtacttagcctgttgttccttgaaaaagtacttggcaaagtgccataaagtttgttcatttgaagattcaaaacttgaagatgtggtaagttcacgaggcattgtggaataatgcctgttaacttgttgtgatgcaagtcgagagcctccattgaacttgcgttgcaaattgagtaagagatgctgccagtgagtaagttgaaacttagatctaggattgtgagttggtaattccttgagaattggtccattggtgttgtcaacatgttatgggataggatcaaagcagataaagaatccattttgtgcaaccaactaggcactgttccattcaatttgttgttggccagattcaggattttcaaaattgggacttttcctgataattttggaaattctgttaagctcataaaagagaagtccagttgcagtaagctggagaaactataattggcacttgattcaaagttgagggataattgacttaactgcgaaagataaagacttttcagattttgaaagttggagaagagtgaaaaattgacaggaccactgaagttgtttgatgataaacataagtaagtaaggtttacaagactgaaaattgattctggaatattgccctgtagcttgttgtagcacaaaaatagagaccgcaaggaatatgatgagattgcaggtatatgccctgtgaactgattattatctagatataaatacatcaacgatggcaaagagaaacaccaagaaggaatggtcccattcagtaagttgttagtgaacactaactcagttaggtttgaaaaccctgttattttgttgggcagaggtccctctaatctgttaaatgaaagatccaagtaaatgagatgttgaagatttgaaagtgttgatggcagcttaccctgtatattattattcctcaaattcaatacttcaaatctgtttgactggtgaaagacatttgggatttgaccagtgagatgattaccatagagatacagaaaagttagacgtggaagggctaagagtaagggtgggattgaaccgttgagtttgttaaatgagagatccaggaaagtaagatgtataaggttagagaaagaaggagggattggcccttggaattcattagatgagatctgtaagatactgagagaagttgtgctacaactcaagttcggaagttggccatgaaggtcaaaattacctgatagatacaagtgttgcagatttggcaaacagagaatgtcatctgccaactttccctttaatccagttcctctaagacttagagtgatcaaagaggaagacaaattgagtggcctcattgaagttgatgacaaatctgtatgattcaaaacaagctcccttaaaactgttgcattttggagcagcctcttccaagtgctttcactccactttaatagaaactgataattaagtggaagagagagatcaagtgattgtaatttggaaaggtgtgagatttgggaaggaatttcacctctaaagtaagtattagacaagtttaggtgcgtgaggctcacaaatccaccaaagagagatgacaagggagatggatagaagtcattgttagcgaggttgagtgattggagatgagaaagatgaaaaagggtactgttcggatggatttcaccataaagcccactgcagctgaggtcgaggccggtcacgtgaccggagatggggtggcaggtgactccaagccaagagcagcaatctgttccattttcccatgttgttgtcttcaggttagtaacagggcaatcataagcattataataataagttgtattaatgggaaaggaggccttgaagtgaagcaaggcaaaactgtcatggggatggcataaggaatgggagaatgaaaaatgaaacagcaacaaatgccaacacacaacaaacaaccaccccatccccatgtatgattccattctaacttgtgtgcaactccaaagtgttcacacagatttactatgaaggaaaatatacatgataaagaatgaaagattaatatttatagccaaattaacaaatttagatgtggtttatgtagctaaattaaactttgattgcggtcctagcatcaggacttcaagagcccattcctcacgcaatgtcgcaaacaaacaaaattcattttgtaaccctacaataacaacattccggtagaccccagtatttccattctttgattttttatattgaatatctttgtttttctctctcttgattcttagacatgtcaactagaacttgattcagatagagcacattttgtaaaccttgagtgggatgatctctataactaacgagaagttttactagtaacagtagtttaatggaattgagtattaaataagataactccaataagtaacaaataaaccataatattcatatcatcatttccaattacatatgcatgtaaaaatatgtttcctggatcgatcattggcggggaaatgtgccttttcaattttcgagagtatggattgaattggtctctaacgtttaagcatgatttttttttaagtaaccatggtgacttcacccacttataatttcttcttcggccttcaaaagggaggaaagtatgacgaaaccttttttggtctcaaacaggcttaataacaaataaattgtgccactgttaccgaggtaacaaatcagacaccaagagaggcaaaaaaagattggtccacttggcagtcagggcggatccagaaaaaaaaaaaaaaagtaagggggcactagtggtgagagttcgaggacagccagaaattttttttttaaagaaaattaaaggaacaaaccattataataaaactgtgaaaaatgtacaattcaaaagagaaaaaattgacaaaattagcatataatcggtgcttaaaaataacaagagtgtgaccactgcattcataaaaattacaagcacacatacctacactcactcccctcttatttttcatcttttttattattctttttcttttcttttcaatttctcattttgtgcaaacatttaaactattttttattttattttattattataaaaaaattatctattcttgaaaatttaagagcggcagatccgtccatgttggcagctatgccataatcaaggttgatactaactagttaagtttaggttctcttaagctaaaattttctataaagaaaagaaaaataacttaaaataattgagctttttgcatatattaattttaacttgtgcaaaattttataaaagttcctccaaaaggtgaggtgaataaattgattttaatttatggaaaaaactcaattcattttactttctcaagtgtttatagaaaagtttatccaaacaagggacttataagtatgttaattgggaaacaaaaattcaccctgaccccatcccaggatgataaaactaaaccttactgataagaatgaaatctacctagaatttggacatctttacaaaaaaaatgttacagtaggtttcatgttagtgataagcagatttttcaaaattgatgttggactcagacactctgctgcaataagttgagcaaaaaaaaaatgacctacctctacagactaccaatgtatcttgggccatactactcaccaagtcctgagctgagtccaaagatatcataaatcacggtactgaaaagtatcatagttcaattaacagctttgattttggtagatcatttccattttccaacatatttgtcttcatataccagttttattttctataacagctttgattgtgaaccacttttgacatatctgtatatacgccaaatcatctcattaaatttgtcaaggactattcaaatggaataaaatttctaccccttctgcactgctaattagaagttgttgccgtcattaaaactcttccacatatagatacaagcatgacttcgtttcccatttcgcttgaatacgtatctccaaattaatttgcttcccatcatcttaataattcgatgtgatgcatggtaggacaatagggctaaagaagttaacaattcctatttgtcttcatatatcagttttatattctatagcaacttggattgtgatccactttggacatttctgtatatacgtcaattcatcccattaaatttgtcaagaactattcaaatggaaaaaggttctaacccttctgcactgctaatgagaagtcattgccgtcagtaataattcgttgtgatggtaagacatttggctaaacaagttaacaattcctatttgtaatttatgcccattgaatgtttactttagtaatagaatttatgtaatttgattttatagaacttacatatataagaggtagatatatatcaataagttttgaaactaagatcacatattgtatagcagcctggcaccatatatctacttaattagttctgaacttaatttcatcatttagtttgcatggagtatcaaatttctaccccattcattacgcacgctgatgctatcacttacattgccttggaagtcattgtaggcaaagatgggacaaaggtaaaatgactgctttgattttattgatctatgagatttagagcttttatatcctcaattaactggcaattattatgtctaaaaaacatctttttctactccatctaaaacccaattaaggttgttgccagaaccactagtggagttgacttggaagtcaatgccctaaataatgggacttgggtttgattttgttgggttacactcagaaaacaaatagttgtgtagaagaaggaagacagaatgataaagcttgtagaatgtttattgattcattttgtttatttcacataagcactctatcttatacagattgtacatcacaaagttagttaataactagctaaccaactctatgtaactaacaaaactaacctatttgaactaactaactaacaccctcctttaattcaaagaggtaaaactcttaattcctttcatagcttctcaaatcgctcaactttcactgctttagtgagcacatcaacaatttgcaattctattggacaatacacgatttcaatcatccccttattcacctgctccctcagaaaatgaaattttgtttcaatatgtttactcctaccatgagaaatcgggttctttgccatattatagcatacttgttatcaactaacaactgcattggcttcttcgcttcattaccattgcttttcttttataaaaaaattgatagctgtagaatagttgcgaagttgggtatgttcttttttttttttttttttttttttttttttgtggttaaagaagtagaaggtgacgtgcaattgtgatcgaacattaaaatttcaattttctataatcgtctacattaaatattaatgtatccacacaaaaaatcaggcaccacattgtcaaccctcactttgttcaacagcggagcaggttgaatggatgatgttcagcagttctctgattggctatctacatggttgaatggatctgattgtgaagtgtagaaatatatgcgcaacagagataaaggaaagaagaattaacatacagattttaagtagaaaatcctttcagaaaaaaaatcacgagcaaatgagaaacaatttactatgttgaaaaaaaaaggtacaagagaacgcatacaagcggttaggttacagcagcatatatattttgtaactgctaatgtaaaaccttatcacaataaaggtccatacagcagggatggctgctaccactacagacccccgaaaatttctcaaaatatttttcaccaaaaattcgggtcaccaactctaacatgaagaaatcattggctatttgattgagagtagattttggacagtggagcacgttaattattgcaaaagcagatatatactgtttcagtctttaaagtggcgcatgcatgattttgaccaataatctttagaagtttccaccccaagatgtagttaaatgcaacattgatgccccagtgaaaaagaccaaattaaggtacaggatttggtataatttatctttcgagattggagaggccgaccggtgatgttttagcatccgcaaccagatgttgctgaggtacttaatttgtttgagatgggccattataacagctgcgcaggcattgttctctcatgtgatgtttgaaacagattgcaagaaactgcatgcatgatacatggcagaaacctagtaatagaaagagtcatagatactttgcatctttgaactttggtagatgaatgcagaattaattttagcccgaggactttattcatttaattccttatctcatacatactccacgataattttagtttcaattagttttaaaattttcttttatattattatttttatcttaaatctcatttacttgtaatttaaattttttttcttttaattttctttaaaaagtgtttttaattttcttcttgaatttacactacttgcttagtggttaatatttttagttaattatttaaattaattatatacagtatatgtattttttttataattttaaatttttttcttgttaaatttacacggaatactgcatgaaactattcccgcctttatttcttcttgttctcataattcataaatgctcacgggagaacaaatattatttaaaaactacgaattaccaaagtactaccaatcaagatcaacaaaccaaagtactaccaatatcagaggacctgattgatgtgtccaccagttattaactatttcattggttattcacatttctaattattctttaataaatttagaatcttactaagtaatacttttagagcattaataatagaactaaaatgaacaaatatttattgtgaaaatcatatgaaaatgtaaaaaagtcagtcataaacagtataattttatgtatcccataatttttttttttaatttcttaacccatactataaagacacagattactatttgtcacaaatttattagtatctcatgttatttggtaaatctaatattgaacttcccctaaatacagttgttttactattatagctggtaagttcccaatggaactactacgattgaggaaacataaataaatgaagcatttggcatcaaagaaacaaaatagattcaattttagatcccattctttcaatcctattactattttagtaggagcataaagttaagccgctatgattaagtaaatgttccaagaaaaagagaacttggtttccttcaaaatgctcataactcattttttggtaagtcacccctcccccatcacccatgttcgtatttctttaatttaaaatactttattactttttctccttttgtccttattatcttcttacattcaacttcaactatacaaaagtattcaatcaattctgctcaagttaacgttggctacttaaaattggtatcaatctcctgcttcaaaacgttaggttatcttggtacttaatttatcgattttcaaaattcaatagacctttaatcactgagatgaatctaaggtaagcaaagatatggacgtaactagatattggaatgcacagtttctctacatatctcgttatgcatccatacataattaaacacatatattaggtaacatagaatttatcagttaaataaagtacatttaataaatacaaacatactgtgactaccatatctgcaatatacgattccaacatgtgaatacttttaaaactaagcactaatctaaacttctgcatataagattggctgggaacctcctgctctagattttgcgagtgaggaagtaactggacaaacaaaagactgagttagttgttttcaatataaccacacaaaagggtatatggctaaggatatttaacatagctcattgctccatttaccttggcaaagagtttactccagaactgtctggcgcagtttttcttctcttgtgaggattaccttcgtcaaactcaaatgaatcatcatcatcagaagatgtggaagtagaattctgcatatcagataaatattttgttttgatttcttcaatcctttgtgcttctgtaaaaatgcttttgtgctggattgcatacgatgaacttggatgttcattttctgcaataatttgagaaatggctttctttccatgcaatccttttgatgtacacccatcaccatcatcatcatcatcatcatcatcatctaggtttatgatcttattttcccattccaatttgaaccctgcaggcacagaagagatatgttaaaacttacataaaatttatttttgttaacatgataattcaagcaaaagctaggagaataaagattagtagattctgtaatacaaatagaaactggttgttgcctcagcatttgatgaaaatccagcctcaagctcttcaagtgattaacaatgtatacttttatcaaattcatataatatgtatagaagggtatcatgtaatcttgtttgtatgggagaaacaagttatcttgcctgcttttatttgttctttcttttgttctcatcgaaagaaaattttatcaggggaaaaaagaaaaaaatcacaagagatggcttgcagttttctaagggaacaaaaatataataggactctccaaatcaaaccatgtgtctaacatcaaaggaagacaacaggaacaatactgtgttttacttgagataacaaaggaaaattgaccttaggcttcttttcacaagtagacactttaggctgaaaacgggtaatttggtgctataaagctccctgtgtgggggtccaaggaagtgtctgacttacagtgtggatcaattgtgggcagccttaccttgcatttgcaagtagacaccttaggctattctccaaattaataaattcattgtgtaaacatggtcaatcaaacttgaaacttatggggaactgtgacattttcacttcaaaaacaagattggatgctgtgaggagtgtatgttcttaaattgtgtctaattataattgcaaactgtgatgagcttttaagtattttaatgtgatctggttcagtcaccaattcatccaatttgagcaataattagtggccccaccggctcaattaagttactaaaacatggctcttgaccacagccattaccaataaataatcatcatggttcaaggctcagctaccaagaaatatgaacaaaatgcattataaaaatgcaatttgttcatatttcttggtagctgggccttgaaccatacctgatgcaagcagaattccatacctgatgcacctagagcatccttattccctttgctacgagactgagcatcaattgagtgacgagtatcttcattcctttggaaaggaacatggcccccagtgtcattttcaagctcgtagtcaccaacctcttcaactttgacagtaattccttcagcttttaagcaatctaacaaagactgtgtagcatcttccaacttcacaatcctgacaccgatttccgcaaatttactctctaaattctccatcaatgtctcaagtctgcacttctcatctgccaatttaccattttcggtcctcaacccctctatggcggtcaatttaatcttgattgcttccttcaattcactgttctttgtgctaagggcatcaagagcactcttctccccaatcttctccccctccaaaacatgaatcttgctcctaagttcagccacatcatctagccattttttctttaattccttcagctcacagacttcacattctagagaaagattctttttccttaacctctctatgtctgtcaaattcttctttatcgattcctccaattcactgttctttgtgctaagggcatcaagaacactcttgtccccaaccttctcctcctccaacacactgatcttgctcctaagttcatctagccatttttcctttaagcccttcagctcacaattttcacgttgtaaagcgaggctcatttttcttaactcgtcaatcatgtttttttcaaccaaaccatttttcttcacttccttcaacaactgctcatagttttgctgtgctcttttccccttttcgcattgctcatctctatttttaagtttttcttcggcttcaatcctcttgagcctctccacctcgatcttctcccggagtggctcaatctccgccttaaatttggcgtccctgttcgccaattcttcctcaactttgtcaaaatcctccgtttgaaacgaaacacgcaaaaccgagacaagctgagaaatgctcatctctttgtagtttttctgggtggtggaagtggacataggcggagacctaggttcgagtttgagttggaaggccatgagaatctcaaaagtcgcaaactttgggggggaatgggcaaggaagaagcttgcgttacaattgcttgctacaagtaaagttcctgtgaaaacgaaaaaaagaaaaaatcagtggcagaatgagactttcttatcagtatcagagaatgaaggaacgtaagaagaagtgagatttgaacgtactacgctacgctttctatgtcacaatgataaaaaaaaaaaaaaaacacgttttttcaaggtagggagagtaagaagatgaagtgagtagcacaggaatagggaaggccttactgaacaaaaaccaaagccagttttgaagcctatgaaaataaaaaggatttgaatgagtaaagttttgtgtctgcatgtcaaataagaccaatacaccttttcagtttcggtaagctaaaaggacgcattcctaatgagtaaacacagtgtgtgtgttcacacccaattggaatgactaatatactcatgcatttggtcaaaaacaaaaaaataaatatatgatcatgcattaattcacattgcttttaatttgactttgactaatatttttatactcttcttttctgcatttcggtaagttccgtttttgtctttcattttcaaaggagtttatacctttttaagtgaaattaatgtgtatagaaaaaaaatacacgagattttagccctatatactactaggatttatcacttattgggtgatgatagttgttcttgaaacttcaaatattcattagtactaacacttacgtctccaaatatccattggtttggcggatgaggtgaaggagtggtgtgtaagtatgttaaattatagaatcctttctttactgattgtttatcaaggattactgattgtttatcaaggattactgataggactaatcttaggttagaggatgttgaataataataaatttgatttaggtatattggacttagttgttaaattgtttaatatctaaaaatattcaagaaatgttcaatctaaaatctagaataattcactctagatattttcataaaaatatctagaaaataattgtatctaaaaaccacaatcataaatatataagctaggagagtgtggagaattttagagaatgatttgtagccattagatgagaattgtattgacaaaatcctactcattgattaaggaggtgatattaatataaatatgaaagttcttcaccattttatatcaaccaatagataaaaagagttgtgtaataataaaatattctcttccttcaaatctttctaaaatttttattttctcaaatatcctctttccaatataggagtcgtggcaactggttaatcacaaatttgagaagagtttaacgttgtggaagcataaatatatttctcttgggagagggtttgtttgataagttccatcctatcatccatatgactatttttcctctccttttcctaaattcctacggtagtgtgcgctaaacttgttggcaaactagtttccaaggttatttttaatctcggaacaaaagttggagctggtctggaatatgggagtttggaggaatggcatatggtcttgggagtttttggtgaagagagccttttgagtgggagagggagatgtttttacaactaacaactcttttggaaactgtgtaggcgcataacaacattgttgattcttggatttagagagcaagccctttgggcacttaatctacaaattctgcatattcacaatgaacactagatggtggcttagaggccctgcacatcaccttagcagaggtatggcggataaatataccaaggaaagttgcatttttaatctggagagcattgagagataggcttcccaactaaagataactcgtggaagaggggaattatcacagatgaagctgagttgatgtgtccactctgtaatcaacaagtggaaaccatgcagcatatactcttaaaactgtgaagctgtgtttaattaaaatctggttagaatgtcacagttggatttcgccaggttttgctctagctttaccggaatcacttcaagatcatttttggctccactcgggcattggaaggtcttcagctgaatgcaatatatggatggttatatggagtgcagtaattttttgtgtctggaagaaaaggaataacacttgtttttaatatagattctgctcaaagttctgatatggtacaggatgttaacttctgtgtttggtcatggttgagatcattgacaccaggctttacttgctgttttgtccagtggagtagcaacaccatcacttgccttctttgtgcctaattggaatgctttggtgagttgggccgagggttatacactcgagatcaacattgtggtgttgtgttttgggttgcaatgggtaagactaaggtgcagagttttttgtaacagaagggatatgttatctggggtgggtataattttctgatatagaaatatgcagattccttgagatgttcaggctgttagcttgaggttaataaatattcctatgttagttgatattaatacagcttaacctcattgcttcaagttggatattctctttttgtaatatgttttttatttgggtaccactggtaccaagttaatgatatttgtttgctaatttaaaaaaacaactaatacgtatgtctcatctgctggggatttttttgtcttttatgtttaaaatatagcaaaagttagcatgatatcaaactaaactaatttttaaagtaaattattttacacaatggtcaaattatatgttctaaagatacgaatgatatagtataaaattatcttaattccaaatttagataataagattttaaatttaagtcaaccaatctctattaagtaatttttaagattatttttttaatttatttaaaactataagatctataggaaatatatagtacatagaaaatttaaaatttttagtcaaaattaaataaaatcaagtacaaatattaattattgactaaaatatttggtaactttgtaacatggtgcatatttatatgaaaatatatacacagagtttttcacaatctatctattaaatagagtatttcttttgacttcatatactttttgttttgtcttgtcgcaaagtaccaaaattgaaatttggatagtttttaaaagaaatactatatacaaatacaaaaataaataatatgtttattctataatatcataaaaattgaatattaccagaatattatattagttagaataggatcattttaaaatattactaattcaattagtcaaataaattatatataacaaattttattttttatctataaattattttatttcataatggagatacaaactttttccaatggtaaaaaatacatgtgcttcaaatcaaagtcaatctttaaatacatattttgaataaaatataatatcattaatattattatattatttacctaagagtgattctttgaaatgaagaaaaatacatgtgtttgaatttaaaaatattctcaaaatatagaaatttcaaaattttatattaattatttcttcaaattattttcttaatggtatctataattttaatgaaaatgatttttttaataaccaccataatgaattatgactttatataaactttcctttcaatattaagaattttgttgttttgaaaataactttatttgaccatcatccttaaaagaattagttttataatcatgcatttaaagatactttatcagatataaaaataaaatctacctagaaaatcatataaaaaaatatttcatattaaaatctgcaacaatttagatataaaaaatttcaaataggtgttattatgggtaatgcttaatgataagtacacaacaccctaataataataataagtacacaacacaaatttcaaatatttgactagcatagagttcttgactattgacttagtttgacaaacaaattctaatctatatggtgatatagattgagactagttagtttggctaacaaattgatgtagtcaacaatcaaatgaaatccatgctccattcacacacaagaaaaaaaaaaaaaaaaaagaaagaaatccatgctattataatgtttgagagcaacctcattttaataacacaatagttatggccttaacttgtagctgtgtggtaagtgataggaatcaactgcaaatcctgttttctttttactgtcaagccaaaggattcagtcatatcaagttcctcaggcctattcccttgagccattttccagtcaaaatggaaaagcaaatttgcaagtgagaattcaacattaaccatgccaagattgatgccagggcatatccttcttccagctccaaatggaataaactcaaaatcaccacctttgtaatcaaatgggctatcaaggaacctttcaggaataaatttctcagcatcaacccaatagttaggatccctcccaattgcccatgcattaacaatgattttgcttttggttggtatctcatacccattaatctcacatctctcactgcattcccttggaagcagcaatggagaaggtggatgtaaacgcaaagtttctttgataactgatctcaagtatttcagttcatgaatacttgtttcatccacatatccttttccatcaaagacccttcttacctcaatttgcactttctccatcaccctcgggttcttcactagttctgacattacccaaacaattattgttgatgaagagtcgcttccagcactgaaaatgtcctgacagaaatgttaaggtgttagtattacgtttctaatgagattaatcaataataaccagaatttatcatagaaagaaatttatcagtttaatttaatgtaagtcatagtttaagtgtgaataacttaaaaccggctcagttcaaaacattagatcaatattcattacataactccatataaattaaaatatgaagtgcacccaggacagctcttgatgactgatgaggtagtctactaaataactcagatttggaaattttggacggttttttatatgtaaaatattaaacaataagattgctttgatacactctttctaacgcactcctatcaagttcggatcctctctggcctgtttagcaacatgcagcctttttgacatactttctattactagttaaaatttattaaaaattgtaaaatcataaataaggctaataaataagaagtatgacctacaaatatgtaattttaataaatttcagtaaataaaaagtgtgttcaaaatattgtattagagaatttgtcattaacatttctcttgtaaaagatgttcaagatcaatataatcaatcctattttgactgcatcaaatcatcaattgagagaagaaaaaaatcatacctagaactatttgattggatataattatctttgccttttgcatagatttttaagaaacatactgaccaaaatggttgctttgacaacagtgtcagacagggggtgttggagttcaccattcttctgaagccttaaaagaacatccactagatcttcccctttttcttcaccaacagcctttgtgtccaaagttttttctctgtgatccctaacaatgttctcaagtatcctatccattcctcgatggatcttctcaattctagtcctaatcccagtaagaacttgtagaagtccaatggaaggatacaaatcagcaagagaaaaccctgtaactgtctcaatgacatccttcatatgctctatataagcctgttggtctttggactttttaccaaaagcaatccgtgatagtaacccatatgccaatgaactaatcttctcactgatattaattggtgacccttcactcaaagatatctctttgacaaaaattgacaactcttgttccctgattgatctgaaggactggacacgcttttgtgctagtagttccatggtgcaaatctttctcatctgcttcaaataagttccttgtgggctgaaggtcatgcccttagagccataagtgataacatcagcagtaagcacataaggcctattcgcaaagatgatatcatgtgtgttcatcacttcttttgccatttcgggcgaagataccactatgcagcaaagctcaccaagctgcatatgcatgagagaaccatattgacttgccaatcttgctaaggacctatgaggtagagttccaagatgatgtatgcttcctatgaggggtagcttccttggtcctggtggcaacttggagtttgaattcttggtctttgatctccaaagtgtgttgattagcatgaacactaagaggaagaaaggaaggattatagataaggaaatatgaagctccaaccccattcttataaatcaagattataaccttgaaaaagtatggtttggctgtgaagtaatgttgaggtttaaaccacaaattcacagcttggtgctgaaacgaggaaatatagctggtactggtgcggctgctgctggtttcttagcttatgagaaaatggactgatttttaattagaaattaacaaagataatggttagaaaagtcgtcgacaattaatatttcaaaaatggctgcaagcacgactcttggccatacgtttaattttcgatgctgaggtttatctatatagtcattagattagttcttcgaaatgaacagagattataatcttaattcttatgatactgtgtatatatatttaagataaatgataatttgtaatataatagtttaaaatataatcattagaaaaagatttatttacttacttcttgaattagtattattgaacttaattgcttggttgaataattttttgtaaacattaaattctgggttagtttttttataaaaaagttagaaagaaaatgattttaattaaattaattttgaactgttaagtataattaagatgcatgtacctatttaaattgatcttaactataaacttatcataaaacatgtttttaattaaaaaagtatgaaaaaataatttgtaaatactaaaacaaataggagcttcatcgattcaatcaatgattgatagtccttgataaataaattaatggaaaaaaacccatataatttgatcagaagtggtgtccatctgtgattccaatagaagtgacgttgaagaagttgaagctcttgctatttagatgggtctcatagatctattctttgaatttgatagcaaactggtggtggacaaaatgattacttcatcagcttatgcttctcaagagtgtcgagccttattggatgttggttttgtcagcctaatgatgttggcacgtgtcttgttgttggggctctatatagggagctcatgataatgatataaaaaatttaattataattataaaaatacttttattataattataatgcacaaaataagttataaaaatgtagtaaatattaaaaaattcatttttttatttgagtttaaactagtatttgacccgtgcgcatacacatacattagttatacatttaaatgcacattatcatgttatgtaaaattggaggtgaaaaaaagaaaatataataaaattcataaatgtgaaatataacatgcaaaccttgtaacataagtttataatgttaattacaaaacatatgaacatcaaatagatgtagttaaggaacacaaaaaataaaattagagtttttaattaggttggttatacattttaaaagtgtgtaatgtaaatattcatttgtaaaaatcatatgtagtaagattcgataatgtcaaatataatgtactgaaacattgatagataaattgataatgttaattacaaaacataacatcatcatataaatatatttaatagaaaaaataataaagttagggttcaaaactttagttgagttaaattagaaaagttacaattaatcaaagatttaatttatttgttagcaatatttaaaatttcttatataatactcatgcatatatcaaatggcaaattattttagaatttatcataaataaataaatgttgaatgaccaaatttttaaaattaagttttactttaattaaacattcaattgaaataccattatttatacaatactctatttttgtaaataatgttagttttcaaaatatttataaattaacattaaaatgttattaattgaaagaaatgatctactaaaacaataacagaagttctaatagtattgcattaaaaaaagttctgatggtatttacactctttttttataaaaaaaaaaaaaacaaagataatggtttttacactctaaatctcgctcaaacaataactttattatacttttgttctttccactatgttaatttgatgaatttaatctccatttttttcacaaatttaatctcgctcaaacaataatttttttcacaaatataaaaccactctattgtcaaaagactcaaaactaactgtcaacacagattgtggcatagtatttcaactgtacataaaacccctcccttacacagattgattcctaaagttgtcaacttgctagcaagtacgcctgtcgaaattgtcaatttactaacaaagttaatctcattatagaccaatttatatttatataaagcttgaaaagtcaaaacaaaacaagtaacatctttcatcaatcaaattgtatatatttgatgttttgttaagcattttctagtcaaaatccaaccagatgaagaaatttgaggaataacttgcaacaatctaattaacttcaaatattttttggtaatgaaagccaatgttgtgaaagtacaataactaaatatcacagccattgcactaatcaagtttcatactcaaacaccaaatattttttggaacgattgttactcttccataacatctccctcaattacttccaccttctccttcaacggggtaatctttgttaagaggacctctgcaatggagaatgtatattagtacagtatgtaaaataatttctataaaggaattttctccatactgtttaatcagctagaattaaaaaaaaaaaaaaaaaggaaacaggagatatgggcagacacagaaagggcaggccattaaaggtttaattattttctcaagcaggaacttcaaaaggaaggagatatggagtagatttgttataggaacttcaaaaggaaagagataatcatatttgtgtttcatggattgggtctttaagacccaaaactcatccacacagtaacacacaaccctcatttaatagagcactcatctcaacccttagttaataagtactcatctaacatattctttaatcagaaaaacatgaacgtcaaattgacaactctgtcaaacgtcaattatttaatcatatagcaacaagttgaaaggggcttgtctaacttgagctattatctaagtttgatacttcacaacaccaaattcccaagattatcatatttgtcacaaggtgagatacaatgtcatgctagactacaaactattgacggttgacacacaatactaagcaaaacaatatagttttattgcagtctcaagtatattaaattagcaaaaatcgcaactaacctgtctttttggggaaatcaaagccttttggattgacataggtacgaggatttggtagaaggtggttcctgagatattccttgtgtccctgtgaagcattaatgaagaaattgtgcagaaattagagttagatgactctcatcaaagaacaacctgtacaattgatcatcaaagcactcaccttggttatcacacaaacatcaacattacttccacttcctaggtcattaaatattccagcgcatatcgcctcaacaactatcttaatgccttcatccctctacaccacatcataatgtttatatcaaattaaaatctctatcaaaatgcagcatttcaacatgataaaaagttacaaacaccaccagtatcaattataacaaatataatgcacaatttttacatttagatttgaaattgacatatttgcttcatattcttccattgaaattattataaattgaacagctttgacagaatattatcaaatcagtgttatcaatggtggaaggcaagaattctgccatataagcatgccattgtggtctatggcacagccatggcaggcctcccttcacaaatagtaggcagttagcaaaacccatcgcgccatggcacctccatttaacaacaatgtatcaaatgcactcctctaagggtgaatttcctcaaaaatactctaacgtagagctttactaacgtatgaggctgtgagccttaaattcttacttacactcaaactttccttgtacttggactcaaatacagacattgcagcaagtgaacctgatcccattgtagcaaatgggagggtgtcagttgacccatgaggataaatctgcaaaacaagtcatgagaaattgagctataggcatccaaaacaaggaaacttgagcataaaagaaaagttttaagcaatgaactaacagtatgcaaatgaggtccagtgatatcaaccccaccaagcaccaaagcagctgagacatgcccttgataactgcacaatagtttaaaagagtcagattcagtggttgatacagagagaaaattaaattgatgagaaaattctgaaactcaacttgaaaaggtgtttcttaagaagggtcagtgctgtaacaactcttgattctcgaccagtatggtagcgatgtaattgcagctgtgagctaaccatgtctacagtaaataacaaacttctcattttcaacaattttactacatcaataataacaagagcaaaagctaaagttgtggtccatatgcaactatccataaggcataacgtaaaaatgtgtaacaactaacaagaaaaatgcattttaaacaaatacctgttacagcctctgtatcagcagctgtgcctgctccacagcaatatatgttgggtgccatataatgaattttctcacagtttttatcagccactataggtccttcagttgccctagtatcagcaccaagaatgacaccatcctgaggcagatttattaagtgggaaagttcagctttagattacaatatacaaattaaacattaaaaataaatatgcaatcaacatatgaagtcataaaactttgtttggaatagataatattgccatgaaaagtctcattaacagcacaaatacaaatgttacaattcccagttagtggactgtttcacaagaaagcagtctgtactctgtagacggagcaacttggtttcaaatttatgatacaaaatcttcatattaaacctcagctgtaacattagaatcacaaccgcgttgattgttccccagctagatggaacaatgtagacaagaaaaaagcttaaccatgctcaatatccaccgttgaggtcaatatgattagcagttactgaagtagccacttatatattacaaagtttataaatcaatgcaggagctttatgactttatttcttgccaattgtttctaaagtaaaatcattcatatactttagaacaaaaattaacattttacttaaaatatttttagaataaaaaatcaatcaaatttctcagagaaaagagagagtagtaatagactaatattactactttacagatagaaattgagttcaaaaacagtcacgtagattttcaaaacatacaagtcaagatatccagagccagactaggcttcccatattctcttgctataaaacaatgcacaatttcagaaccaactatttccctaacataaaaataaataaataaaaattcaacattcgcaacctacgcaaatataacacccaaaacttatagcatttacataaggtgaatttccttcacccgcacagcgaaacctcacaaggccagacatctatctaccaaaacaaattatctaattcattcgagatgccaagcagaaccataacttcacatcatgtgtctggatccattattccattggaacccactcacaattacggtataaaaaaatcaaaataaagaagcaaataaaaaagagtgaagataaacacgtagaaaaacaaataaaaacccagcgatgtttaaatatataataataagaaaaaattaggttaactagacatgaaaagagcgagggaatgatttcagacctggaaaactaaaccgacaatagtggtcccagttttgagaaaggttggggctttgaggcccttgttttgaagcattgcgtttcttcggcatagatcaaaactgaagccacccttgggaggaagatccaacgacggagacatattcaatggaccctgcaaaacatatagaaagagaagtttgacggtgggatcggaaagaaagggagctccaaaaacctagctagggttttgaatacataatgagaagagagaaagagaaagtaggataattaaaaataataataaaacgatacgaaacgaaagtcacagtgacagagaagggaggttgacgttgaagttcttgatcttgagccccgtatctcactttgaagtttgaaggaagcaaagttcttcgaatttgggtcgcttctttcttcgatacaaatgattatgaatccccctcaattacttgcacaatgggtcacgtgacaagtttatacaaattgcaaatcactccttgtatattttgcaagaaaatatctcaagtctcaacaaataattattttaaagtgctaaattcataaataaataaatagaaaactgatcacataaaaaatagttaaattgacccgcaggtctcatctttttttactaaatttttaactaggtctctgattttttttttcttcattagattcatattagtaaatatatttttttacaaataattgataaaaattaaacgttatttttaatagttgatcattacttaataataaaattatatattttacgccgtatcaaattgtgttgctatttgtctaattagaaatattttaaagtcaaacataaaataaatttaagaaaataagggaaaaaaaaacataaacaagttttaaaaaatagttttacttggttcaaattggatattacattcaaatcaaattgaatgagttgtatgtttagttcaaatgattttttatgtaaaactaaattaaattgcatcacaaataagactgtttaaaactattgcaaatctctatatcaatctattaaaatgaaaactcataaaatcaaaaacaaaagaaaaatattatatttatatcccttatatttaatagatatttaacattatctaatattttttaaaacttttataagtaaatgttagcaaaaaaaaacttttataagtgatataagatgtatttgttttataaaaagtttgtaatagagatgaaaatagattacaccaaatatgttttgataggtctaaaagtgacttttattacataaacaaagtctgaatctaacatatttatttattagcagcattttttaagatctagtctaatcttcgtgtttaaaagtatattttatgataagacttgtaaaaaaagaattataagcttgttagcctaagtagacctattctacccatgaaatatatatgggttaaagaaaaaaaatattttaaaaaaaaaatcctcatttcttatacatttttatttatttatttatattattcgcgtcattttatatacatttgttttctttccttccacttaagtatacaatcaaacaacctataaaaccatccattttccttttattttttcctaaataaatatactttttgaagaaataccatagtaggtataaaatcatattttctgaaaacagtgcacatttggttaataacataaacatgaaggatcttgtagcattgtgtaccaattgttcatactagtgttcgtagctgtgattaagttaatacaagaatattcatattatcttaaccatttgtatttggcctgcaacattcagaatttctattagccattttgttgcttgtttatcatgttccgtcatgaaattggctttcataggatgacaagctttttatgcagtacattcccctaaagactagcagttagaaactttggacttccaatgcggcgagtctgtaccccaaccatgtccatctgttacttgtccaaataccatgcacttgcatacaccatcaaatccttttaccaaacatagtgaaagccaaaattgccccaggaagggactaagtcaaaattgtgttacttcaaaaaaattgaaaaatttgtgttaattttatatccgtttcagtgttgttcatatatcttccttcaaattttggatgcttagcaatttaataacttccccacaagaacttcatctttaaaattagaacaacatgaaataagcttgtgcattgtctattagtctatgcttttaatttgaagagcttctgctcttgcttaagaggacatgttagattacaaaaactatgataaaccaacacataaaagtagaggtctgaaagagtaattcctttgttctacctctgaaaaaatacctcagaccacgataactagaaataaaaacaacttagcagggataagaatttgatgttgcctaagctcttgcaaagatggtttgatgttgatgattgaaagaactggcttttcttattcttataacacccagtcttggacttttatattaaaaaaaatggaaatttgaacaatcataaaattataaattccaaacgatcgagtgctcaaactgagaacagcactggatgcacgactgaaaagcctatcagcactacccttattaacattaaggtgcataccatccaatatatatcttcatggcctacaatctacattaattttattaaactacagcccagtgagactaccactcacacattaatctccaacaaggaaaagcaacataacaagaagaagaatagataatgaaagcaatgaaaaccaaaattcatatacagcaacttacaacaacacaatcatgcatacacagtggcggacgcacacgggggcctgggtccccccaaaaataaaaaaaaccatcagggtttgaatggcagaagatagttgaggactgggatgattggcaaaagtggataagtattcgaggtggtattggtgttccttcaaataagagttgggagttatggtggaatgaggaacaggagcatctgcagcacactggatttctggggtggatatgtgagattatacttgacctgcgtttctttgtctatcaatttgaattggaccccccatgctcaaaatcctgggtccgtcactgtgcatacatacacaaatacagcttctgtacatacccaacaataacatcatgtaatcaaggggtcctgttaggctgttactattattttcgcttttattattgttagcaggagaacatgaattctctattactcaaacaagaacagcaccagtagccaccagagttggcctaatggttaagagatttgagtagtctacatgaagtcctaggttcaaatctcattgctgctattgtacacactcaaatagtaaaaaagaacagccccaatcaaaaatcaaaatcacttcacctaaaatcctaaacacaaaactccaaatcatacatgcttgaggattattacattacactacactctaaagtctaaacacaataatcataaaagtcagcaatatgggaagtatggtccatggtgaagctatgaatcttatccaacttaacagggttgttcttccctcctaccagcttagccgggttcccgacaacagtagtccttggaggaacatccttaataaccgcagaaccagcaccaatcttagccccatcaccaaccttaatattccccaagatacaagttccagcaccaatcagcaccctatcaccaatctttgggtgcctgtccccagaaaccttaccagtccctcccaaagtgacactatgcagaattgaaacattgttccctatcacagcagtctctcccaccacaatcccagtcgcatgatccaacaaaatcccacttctaatcctagaccccggatgaacatccactgcgaaaacctgggaaacccggttctgaatcatcatagcaagaatcttccttccctgaagccatagcttgtgagccaccctgtgagcctggcacgccagaaagcctttgaagttcaagaagcagtgcacgtggcttatgcaagcagggtctctctccttcaccgctctcagatcactcttcacagcatccatgatggatttatcggtctccaaaaccgtcacaaaaagatcataaagtgtgctgcttgggaggcttgagttgctgagtttgatggcaaggtgattggccaacgcggtttgcagtgagttgtgagagagaatggaagtgttgtagtaataagacaaaatgggttccacagtgacatcgagtttggcttcttcatgcatcttcgtccacaacacatccagttcaacggcctcatccgcttcaacatgttggacggtggaaccagtgtgcaaggtgtttaccctgttgtgattgaaactggttttgaaggttttggagtgattatggttttctgtgacttgttttgatgacggagtcagaagggtgtgagtgtgaggatgatttattgggttgttgttgttgtcgccaacaaagaagagggacccttgttttggtgatgcagtcacaagggaatgccttctcatcatggttttgtttccaggagaagatttggaaggaatgatatgtgatatgtgcccctaatctaagggaagaaacgttgaaggttatggagatacaagagaccagattccaattacactatcaatttttttaaagagaaaaaatgcatgcaccatcattatataaggtgaaggaaacgtttatcattgatggattgtcaaagatacagtttttgtttgtccctactaataactaataatatctttgtatgcaccataatatattaacaaaatttatattttctaagtttaataaataaatattcttaaacatataataaataacttaaattatgacaaagttttttaaatgttgataattgaattaattatttaaatttaatttagacatcaagataagaaaaaacattacacctaaaaagatgaaatacagacaaaaggctaaaaaaagtaatttgagatagttggaagaaatttttatttttatttcagtaatgctgtaaatgcacatctaaaagacaaagaaagttaatattaaaaaaattaattaagaaagtgagagtgagtaaaagtcctatctctaagttatgtattataatatataatataataatagatttatcaagtaactattatttcgttttaataatatatatatatataattaaattcttaaagtattcttctatgaataattataaattaggtatgcatattacaactatagttttaagtttttttaattaatcttcgttttgattatttcaaaaaaaaattacggaagtttaaaaactccaatgtaatgtatgatatacgtatgaactgttatattattattttcctttgacaacaattaaaactataaaatattttgtgtattataagaatatgtctaaatttaattcaattttcaaaatataaactaaaaattatttaagagaaatatttaacattatgaaaacgtataaatgcaattcatgtagattaatctttgaaacacgtaataatatatgaaagattataaaaaaaagaagtaagtatgaataaatttcaaaaattaaatttagaaacacaaaattacgtgtcagttttttgtagggaattgtacaaagagactaaattagtaaattattcttagaagaatatagtacacacaaaagtaattaatttgagaatataggtattagagagtaagaaataaaaataataccttaacaagttaatattaaataaagttaaaaatatattcttttgacgtatagaaaagggaggaaatacataaattaaactgattaatttttttttttggaaagcataaaataatttcaataataaaattacatacattaagaataaaaacaatataataaatttatttcactctaagaaatgatttgattttataaaggcgaattatttaattatatgttgaaagtcttagaacctgccagttttgtaaaaggaaaagtccacctttggtttcattgagtcaaattgtttcaaaatatacattaccacccaattcccatccctcgtcattcctattcccatgtaacccatgacatcaccattatcatagcttcaacacattcatgctccttgggcttagccacctccaatatatacatattaaagagtatataaactactctataatctatatttataacattttattatttgattagcggtgattttaacatacacgagagaatgaatgtttttgtaattaatatctattatcaatgtagataaaatgaaaatttatacatactaacgagtggttgatttaagtagtatatgcttaatttttaaggtcccgaaatttgagttttacatgtgaaaaaaaaacttgtttaataagaatgatttcctattaattttgtagaagatacctatagtatagggaaaaaaggtgaaagatcacgagatttatttccaaaacagtaaaaaggaaaatattgtagtgctagagaattatggattgcgaatgttatcgtctctaaatagatattaacaccaaagagaaaattacagcgacatcttataatttcttgaaaccgcataaaacatttatattttttaaccatcattacaatattttatgttaattatttgaaatacattatattgacactgttattttctaaaataaaaaatatttaattacactatgatataatcataaattattaaataatttgtgttaaaatgactatatattattttatactacaagttcattatcattagactcttaaaaaaattagatgttagtgtaatttgttgtactattaaatatgtataggtatattaaagagtttaatgtttatgtattctaaaatagttttattaatatttaattataaattattgttaaattattttaagataattattttaaaaattaataaatttgtcattgaatgattattcaattttttttactaaattttcaatgtataactcttttttctatattaaatgtagtcaaatatttcactatttattatgtctggcaatatctattttatatcatatatatcttgtcccgtgcgagtctttattctttgtttaagttgtttttgtatcatatggcacataattaaactgtttacaaaaaaggggtatctttcgcgtatgattgatatctgagctcttcgaaaatattttttataattaaacttgtgtattctaaagataactgtattgttgacattgtaaagtaaaggacctaaaaaattaatatttcttttagaccaaacatggcagtcgagacacacttgtctggttcctacaaggctggtttatataaaagtttgattgcacttctatttctcatattttaatttacttgagattttaacttttatttgttattatttgtgtttagtttatttttagtttttaaaatgaattatatttaataattaaaaaaacataatataaaagtgactttaggtagcatttgaggaaaaaattcatcagaaactattaaaataagttattttaccaaatacatgctttttgcctaaagaaactttttatctagtaaaataaactctgaactaagtgaaaaatgttgccaaacacattatgagttttatggcatgtaaaaattatatactcttcttattattggaaatgagtaaataattgtcattcttagagtttgtttgaatataaggttaaaaatatttttgagagtttttttattaaaaaaaatattatatttttaatagagaagttctcaaaaacacttttgacttatattcaaacatgttcgtatttttatatcagcatttcatgcctagccaagtaaatctgatttctgcattattgaagatgttgaaccaataaccaccaaaactgtgcatatttgatcatgttgattgttgtgtaatatggttactccatgtctcgaataaatcccaaaatctatatatgcccaatatttaaagttactagtcttttccagttaaaaagccttgatagaggataaaaaaattcaagaaaatagaggttctacttcaagattaaaaaaataaaaaattcttgaaagaaagcttatgcagccaggagagcaaaacatagtcaaataaattcaagaaaatagtgctccagcaataactgaggtgtagaatgtattagggagaccccactaggaacaatagccagtattcaccaaaatatattggcaaaggatcaaaaagcttgacagttataacagttcttttctaaactaagcataaagaacagcatcgtgcataactttcaaaccaattaaaataactccatgagcataatttactaggaaaaaaaaatgtacaaaaattcagaattaaataactgtatatggtatacttataatatatctgttaatgacaaaaggccaggaaaaaaaaaagattcatttgcagtgaaatatacacaatattataatttctgttaatgatttgtatttcttgactgctactatgtcaaagctcaatttcaattgaaggaaacaacaagaacataagtagagaagggaaagggagaacactcaaacttttcttacaaactcacttcatccgatttcctggattttcttttcttttcttggcttatatgcaaattcactattacgtgagtatttctaaattgtacaaggcacctcttggtacagtatacatacattcaaacaacacaactcctaaaaactagatggtattaaatgcaagatacatgaataagaaaaatactatgaacctgaagaatcaagatacatgcatgaacaaagtagattaatcaagtttaattaattaatttagtagttccattttccaagatcaatatggttaagaacctgaaatgggggatatgcttagagcttgtcaatataatttttatataaagttcttagatatagagtcaaagtattcttttatagtaaatatattaagtaattatatttaaattaacttttcatatcaaaattcaatttcttgcacgggaaaatctagacgaaaaaaaaaatcaatgtgtgaatgctttctcctctattgagccctcctgttgttaataatctgatgacaatttgtttactggattccttacacaaaacccccagtctatccagttggaaaatatttactgaaacttgtggctaagaaggtcgttctcttattatatagtattagatatattgaaaattaagagtgatgataagtgaacatcttcacatagtatacactttaattaatactctatgtctttctttgtatcatatcgcatatatacatcattttctcttctctctttctatataggtgttaagtaaagattggaaaacactaatctttttcctataacaacaatagatgaaatttgcaggagttggatgtgggatgagtccaaggacgtctccattgggcttattacatgggttctaatctaaataagaacaatgtttatttgggagcaactattaggcacaaagcatgtttaagcatcactgcttaacaccgttagtgcaatatggatcttctcctgcatcttcatcaaaattttctctttagttaaaatcaaaaccagtcactatattctcacttatttaattgttgtacaatgatcaatgaagggctgagatgctgcaagatattgctagaggggaatttgggccagagagaatctagactccttgctggagaaatcattatgtggtcttagagtatcccttgtcaatggtctcgaattaatctttatgtcacacatgtttaaatttttaacttatatatgaaaaaaaaaattaataacattggttgaaagtcatagagattggttaaaactatatttgagtcataaaaattataagatacttgttcaaaactttttaaatagtaattttacatccgtatataattctatgaccaaatgtatatttctcacggtattaacatgaaatttattccatatatatgtgcatgcacaattccaagaatcttcaccggaaccaaataaaacagaagttcccattccttgatattttctaactctcatttccggtacctttatccatagccttttactgttcttaataagcaattcctttatttttcttatgtgaaacggtggacaacaagtaaatgaagcaaattcatatctgtgaatctatgagcctaacaacttcttgcctataatataacgggggatggaagcgtgtgtgtgagagagttatgattcatgacaccatcaactcgtgactcatgagtgaagcttattaattgtttttaccttaaatggccaaggactgtaatgaagggagaatttgaaatgatttttggtgttgtaaaaattaaggtgatattcactatcgtcactcttcagcgcacttatgtttttatattctaactcttgtactctctctctctctctctctctctctctctctctctctctctctctctctctctctctctctctctctctctctctctctctctctctctctctctatatatatatatatatttgaatacaagttagaaatatttttttaaaattttttttaatgaaaatataatatttttttcgtataaaaactctcaaaaatacttctaattttatattcaaacaaactctctatgatcagtgacatatctacgtataagctaaagtggataaaattaaaatcaatttttttttatcttttataactaatcatatttatcttgttaaaaaattattctgtgaggacaacatctattttttttataggagtaaaaaatatttatttaatatattcaaataaaaaaaatatttttgtgaaacaattaattccattacctaattatccttttaaattttattgtttttatttttttattatcatttttaataaaaacatataattttttatttgagaaaatatcagaatatttttaaccctcacttaatttttttatttttttttaatccgccactttctatgattatacaatagctgcatttattgtccttattttcaatcccatcatttgttatgttttctaataaagcaggtggaggttcctcaccaccactttaaagaaatggcttcacgctattagaatctattttctttatgtgcaatccaacccaataattgattaaatattaattgaaaattataggatatgaatataatgtaattaactaataatgaatggactgatcaacttttaaataactcaatatgttaattaccacccaaaaatcaaattagtgtccactccccgatcgagaaaggacaattgctcaacacacgttaatttaaaatggtttccaatatattaaagtcaagcacgaccataaatatctattaatttttacattgatgaaataatttcacttgcattttatgtatttgatcccatcatctcatctcataggtataggtatacaaaacaattgcaataattttaagtgtcactttgtcacagcccacacaaaagtttaggagggaccacattcttaattcattaaaatcattatcatgaactgaacattttctctgcaggaaacacttaaatattcgcattaatcctagaagtagctgaaccataacttaaaaaatctatctcatactgcatctattaccagatgaaaatcaaacattcaagattgtccaaaatctcatcattcatagcattattaattcaaaatgtcaaaataattttttgctaaacgaaaattaaaattgaacaagtggtgacaattaacatagtagtttatgattctataactatcataaagaaaataactctatttggtgtttttttttttttgacatttttatctccaactattaaaaatcagtaaccattataccatttcattttaacttcaaactgcatttatcttttttttttaaaacaaatcactgtgtaaaaaaaaaaatattcacagttaacttccatgccttcatgagtattttgcacttagtatatacacaaaggagggaaaaaaagaacatttgaaaggcatgcatagagaaagatccaaaaccagttcaccaaaacaaagagaagagcatagtggggggcagttgcacccaatatccgcaccccatgaatctataaccgctcttcttctataaaaataaatacactctcagttactcaacactctttctatttctactgatgcatttggcaagtctcataagttattcaacttttcttaaaacaagaaaaaaaagatttttttatgttgcttctattaaactaaaaaaacaaaagccacgtttattttcctagctattactctccttctttataattcatatataataacaacatcaacagatgcatgcctaatatatcaggattggaacagacgtatgtatattatcaccatatataacgctcgcatatttattgcaatcagctactccacgcttcaactctaaaaccgttactctactatattcatcagtaacacaagctttttgttctcattttggagtttctttttcccactttgctcctataataataacacatcatcaacagtttttaacatacacaaaccttcatgctgagtttcttattcgttgcgtggcaacgcaataatgatgatgatggggttggtgtcttccagagttttgttcttgtttgttgtttcggttttcgtgatttgggctcaggtggtggatttagcagaaggtggtgctgttcgaaattacattagttgggaagatttgcaggtggatgaacaaaggttggccgtgaagtcgtcccataaccaggttcaagttataactgttaaccagaatggtgggggacattccaaaactgttcaaggtgctgtgaatatggttcctgataataacagacaaagggtcaaaatttacatttttccaggaatttacaggtcagtacttaactgcatattttttcatactactttttgggtgttgttttattattataaatggagtttcaatttcagtaatccatatgctaaagattttgattaaattgtcaacttgaattattgaggtgaaactctgattttgatcgaagaacaactccaaaatctaagttttgtcctttttttctgaattatatgaagccagtaaacaaacatctaatccatggatatttgaacccgagtatcaggaaaaagcaaaatattttatgaaaaaataggaaattcttctaaacagtctgctataatggaaaaaatcttatattttgaaattaattcatcaagttgatgataaaatacatggattaagaattatattctattgtgtcattattattcagttctaatcaaaagaagttgttttaattgtttgccttgattaatccatatttttgaaaaaatacatttttgtttttgtttttggggtaacggagctgggtttggttggtgtttttgatccaacagttacatttatttggtttcctaaaatttcatgagtcatcaaggccttgaacttacatttttttattttatcattaaaaacttgacttatgttattttatcctttgtgtatatgcaatttgtgcagagaaaaagtgcgtgtgcctgtgaccaagccttatgtatcatttatagggaaaagaaatcgaactgcaagtcctattattacttggaacagtaagtcatctgacaaaggcccaaatggcacagcattgggcacctatgcttcagcaacagtgggagtggactcagattatttctgtgcaactgggatcacttttgaggtaaggacacacaatttttgctaccctggattccctgcattcacttttcaacacattcaacatttcagaactattgggtgaagattaaacgacagtggttccaaattagtccccacagattcaaataaatgtagaaaaatttccgaaattagcttttatgattcacataatttgttagtttcatatagatcctgcgtggtatcattaaaatgcaaagtccctacatataagggataaactgcattttaatgataacatttgaaactaacaaattatgtaaatgtaagaagttattttcagggatttttttttttttttaacttattcgaattcagggactaacttagaatcactatacactttcagataccaaaatgaccattcagccttaaacgactcttattttctctcagtcaatcaacttaaaacacacatttaaaaatctgagtcagtccaattttcattcaatggttataaatgtactgaatgtgtggaaaagtgactgcactaaatccaattccaacacaagacatgtgcattttggactatgtcaaatgccaatctttgggtgcatggttgcagaactcagtgattgcatcggctggtggaaaagggatgcaaggagtggcactgagggtaagcagtccaaaagcaatgttctatcgagtgaggattaagggaacacaggacactctcttggacaacacaggaaatcattacttcttaaagtgtcgcatcataggaaaagttgattttatctgtggcagggcaaaatcactctatgaggtaaatataagaggcaaaaaaattaaattattgtagtttaaataagaaattaccaatacatagcagtttggaaactaattgcaaatctatagcaattaatcacgtgcaaccaagacgtgtttaaacacgtcgtccctggacgtgtttaaacacgtcgtaccacgacgcgattcagcatgcaatcacgtccatacaggacgtgacccagcaccagtcacgtcgtcccaggacgtgactctgctcccctgtgctttttagtttgatatatgccagttatgctaatctgctccaggataagagacttgtgttgttccaaaagcagtatttacttttgcgtacactaaaatggcttaggcacatttattacctcaaaaaagttttctatttaatttttaaaagtatagttgtactaaacaacttgcttaatatttgtaaaaaaataataattgttgtattaattaatgttgtcataggtaacattttataatttctgtaaaaaacaaaagagtaagattttatatctttaatgttatgagaaatgatcaaattttaaataaatatttcataaaaaatattattttaaatttttaacgttaattaagtgataatatatcatattataaattaatatttctaataacattaataattatgatggtcttctattgtcatttaattaataataatttaatataaaaattttaatatatcaaataagaacataaataataataaaattattaaaaataaaaaataaaatcagattagaaccttttttttattttattgtaatgataatataattttaatatattagcttgaaaatgtgatcttttattatgagaattgactcaattggtgaacatattttttcacgtgaaaggatccgctttcaattgaattcaacttgtagttaatttaattataaatacaactaattcaacttataactaatctaaattcttattagaactaaataaataagaagtaatataaatgttttactaataaaagaaaaataataagctgaaagttaatggccatttagttaagaaccatatatatatatatatatatatatatatatataatagtaacattattccagctttggtttttcctcggtttacagcaccccagccttccgaatagttaccttagcactcacccatattattcataaaataataaggttatgctacacaacccgaaaacatccacaggcttagacccagctactatttcgctcccgacaaactaagaatagctctataagctataccttctcacgtagctttagttcggtcagtttaatatatttatcccggcaaccatgcgagttcggtcctacttcgttatctttcccacatctcggcactactcacttatctatctcatcatttctgctatagtaatgatttcctatcacctcggcatcttccctagcatctatgcacttcggctcgtctgcatttccggggaacttcctgtacaaagcatacacaactcggcaaaaccagccatctcgtgtgctatgcacataccccggcaactccaaaagcacctcggcaagtccggccataactacctcgacactgccggaaggccacttagatcccagcatctctatccacttaccataagtgcacctcggccttccgaataaaactcatgcaccataaccatctcggcaaagcatacaaaatcggccatagctatatgacatcaaacgcagtacttatgtcatcaaacgaaacaccacatgtcttttgccctcaaaattgcgatttagtctttgaacacccaaaaaatttcttgttttccaatttgggacttgccagcggcttctcctctccattttgagcgcgtggccaccggtttcgcctcaatcggacgtcccagtcaaaagttatggtcttccgaagtttctacgcgtcgcgccgcaagatgacacgtgtctcaaaatgacacgtgtcaccccctccttagtcacgtcctccctcgacgtgattcaacccccaaacacgtcctcccacgacgtgattaaacacgtccacctacgacgtgtttgattgctatacatttgtaaatagttttcaaactgcaatattttcgtaatttcttatttaaattacaatattttaatttttttgccaaatataagatgaacttttttctctgttactaaaacaaaactagtgaccaagtttattgaatttaattctgatccttgagaactatggagcagaagtgtcgtcttcagtcaatagctgagaactatggagcaatagcagcacatcatagggattcaccaacagacgacacgggtttttcttttgtagggtgcagtattagaggatctggcagtgtataccttggcagagcatgggggaactactcaagaattatatactccaaatgtaatatggatggcattattaatcctcaagggtggtcagactggaatcattcacataggaagaagtatgatagtattattatttgctccaagtactaataactcaatttctaatatatatttttaacacactctattattggttaaaattcattagaaactacaaattgtgatttccaatacattctaaccaatagtaaagtgtgttgctagtttttctctatgttttaaatatgacattattattccattctagaattcatagtgcagaatatgtctaagcatatatggtacttcaggactgcagtgtttgcagagtatcaatgcaagggaagaggagcagatagaagacatagggtgccttggtcaaaatcattcagctatccggaagcaagtcctttcctgtacaagagcttcatagatggagaccagtggctcagactgtagcattatgatgcaccaattacatgacaattattcattattagtttatatgcttgttattactatgttacgtatcccccaaatgatcaattttgatgcttactctttatcttgcaagggatttttttatatgtatgactcctgacgtgctcttactcttgtcgatattaatatgaaagcactatcattgtcatgttatttgcaaaggaaatgcctctcttatagaagtgaggttaaccattacctttataaactatatttaaacaaaaagtgaggttgtctcattttgaaattaaaatatgccacaaaatcactttataatttaatttatttgaaatttttatataaagttatatataaaacagaataatatgcttaaagaaaattagtatttaaaagttaaatttcaatctcattttcatctatttcataaataattttgcattaataattaaagggctttcatttgtgttgtgtgatactggggattagggacagattcaagggggcaaaaaaggaccctagtctcccccctccatcaacactttctttatataaaaaagaaagatattaataggaaaataattgttgattttataattttctaccagtaaagtaatagatcttatctctaattttatatatatgtaatcaataatatatagcttatatacgtcactgtataacaatgaatgcccaaaatcaagaatctgtacctagatcaaggcgtcagaacagaaaattccaacaaaataaacaacaaaatcaagtaaattattttatcatgtcaatttagtttatggtcatccataacctcttctgcgcagagatgtactcaaggttaaatcacctcgcaagaaacatccattgagaactccatccccaaaattaacaagtgctttccagcaacagaattacaataggcaaaaaggaaaaaatggtcaagacatgagatgcaagacttaagtaaaacaaaatctacattttctctatttaatttaatcacttgtcaacttgcagtgacttcaaaatcttggatgaactgactgatcaacttgtaatgaaacagacaatctcattatctaccctcaacaaagatcatttgtatcaacttgcaatgaaactgaatctcatttccagaagtaaccacgatttttttgttcttgcattctcctgcatcatttggaaacacccagagtaaaaatgtgggttgaacacaacacaggataaatcattagtgtaacgtcagctatatacacaaaagaaaccttcaaccaccaatatgaactcagtaaaaacactaaattctcataactatcagtgaaaacataactgaattgaaacaaaccaaattcccttaagagcgcatttcacttgttctcttgttattaattatgtttttgttataatcacaaattctatactgaaattttgtattttcaaaatttagttaaggaaatactgaaaatattataatcttcaaggtttgtaaaagattaaatattacctttgatgctccttggaacgcctgatgaactcacttggaatatcacatccttggtaagaggctagcactggtcttatatcaggtggactactacgggcaacaactgcaaatagataacagagaaggtaatgcaacttttacaagcataaaaagtcaccacagtaacttcaaacataaattcatttataaacacatcttaagggaatggacttacactcaaggagtgatgtgaaaataaaaacaataattcaaacaataactcattcttcaatatatcttaaggaatgcttacactcaagaaatggtataaaatccaaaagagctgtgtcatctatatcttgctgctgccaagccttaatagggagacagttctcaggttgtaggcaactttccaaagcatggccacttaaataaagaacttttcctggattcctgtttagttttgagaggtcctgccaagcaaacaatggaaaaaggaaagaacaactcattataaaaatatccagaacaccactagtacactatgcatgtgatgtatcaagtatcataataaaaccataggtcttttattttatattcttcaggtgtaagcaaaattacttcgctattattttatagataaaaatataatatttccaaggcacttgttcttattatttgccatgattggttgtactccttccacaggtatttatgtatataattaattctggaagagaataatgtaagaacataaacacatactctgaagtgtttcccatcctgatacttagtagctggcctcgatagcctgtatctaatgcaatgcttggtatccagcctttctataacagggtctacaaactgcacaaatcaacaaatgtaagaatatatgaatatgaatacctatacgagtaagtatccattcagaatatagagaagaatcagattaccatattttgttcatctgtgtacaccactatttcgtagaactgagctaaatgttccaagaaggcatcaactccaggtcttttaaaagtctgccaacctgtatctcgctttacataccataaaagtaaaattcaatattgtagtcatacctctataatatgtaaggatctccagcaagaagcaagacaaaaagagatccaatggattttttatgacataaagtacataaaggaaagtggaatgtaagcaacacattctttactgatggttgaaattcatgagtcttactccctatgtagtggctcctagtctcctactactgatttagtcacccaacatgaatttcaaccaataatgaggagtttatcaaatttctaccaacaaaaaagggtgaatttgcagtagacgtcttaccgtccaaatatagtgaatcaatgtctcattgagatcaagaacaagtgtaaacacatgttgctcctgaggaagcaaatcaggaaggagcttgtctgtgtatggttcagtataactctaaaaaaaaaaaagcaaaagagaacagtattaaaacaaaggaaggaaatataatttattttaaatgacaagtgtcaaaaccaatatcagcatattaaaaagcaagcacgtaccctaacttgttcttcaattagccttcttgcatccaaataaagctctactgctttagcaggcactggggtatcacatgcaaaagaatcagcatgctgttaataacagaggtctaaggcatgcatatatataactaattgggagttgaatacccccaccccccaagaagtgcatacaatgctaatttgtctgcactgatcttcttcaacatctacaatacaacaagttcttgccactgctcactttccttttctaccccctaccctccaaaggtggtggcaacaaacatgcttatatcccacattctcatccatttgcaatatttttctgcagcaaaagtaggggcatataatgactatgattgggcagacctatggtttatttgaaaatgactattaattttagcatttgtcgcacttaatactaatggaaacagtgttttccccatgggacctttacatactatttttcagttgagtaaaattaaaaagatgtccatgcttatcgataacaaagagcacttcataaaatcacaaaacagaaatatagaaccatctaaatgacgagctcaagttttcctattcatataacagcaacacttcaggggaacaaaagttcacgtgaagaaacaaaagcacaacttatttaagggaacataataacagtaatacaggataagtgtgtacggaataaagctcggggaacacacctgtcattgcagttgagtatagcaaaccttgaaatttctgcacaagatatggactagaacatgtcaccttactatacattaaacttaagaaacttatcattatcatatcaaaaccaggcagaatccaacattaagtaaaagtaaggtccactgagggcatttccacgaagcaaaataatagatttaatccgatatcactaaagtgtttcacaaaatcaataaaagaaaaccactgtatattttgacgtagggcgacgaaacagtcacgcaaactatacaagcaatgaaatggagccaaaagtaaatttgttgaacaaatgtaaacgttaaattcatagcatgtgcagagcatttcatataacaagaaacaacattccaatgaccagctcatcaacccaattcaggttagatatttaaacccccaatatgattctaaaacatagaattagcaaagaagaatgaaagtgaagaaagcctgagaaatattcaatactgacatcgagagcagtggctccatcaccggcagcgtacttggccgattcacgaaacgacctcgttttctcttctacttcttccaaactgtaagctgcatgtttcattccaacaaaaaaaaaaaaaaaatcttcaaccaacgtcatttccagatcagaatgattcaataacaaccctaacacatcagagtgacaacaccgacttaaaggaaaaaaaaaaaaaaaacagacacaaaaatgttactagattctgtcgatcaaccctaaatggctactctgaaaatggaaatgaaggaaaacgaaccgtaagaggcgtaaccggcaaaggcagtgcctccggtgagagcgccgacgacggcgtatttgaggaagttccagcggctgggagaagcggcggaaggaggagggggaagaggtgcggaagcggcattggtgcagaggaatcgcttcgatgccaatgaaatcgctggcgatcgaagaattcccaacgacatagttgtgatgtttgtgagcagtgacgaagagagaaagggttcaagtagggttttgctcttgtgctttgcagaaacaagtagaaccacccatcaacttcggctatgccctgtttggctaccagttattccatcatttcttatttcgtaagctcttatttcgtatgctaagccgtgctttggacttcttaatctttggttgtgcttagggtattctactgttttagttttattttcctctttggttgtgttttttatgaacgaatcaacagataaaaaggcccgcccaatcgaaaaacaaggcctggcctacaaacagacaacccttccaccaaacagttcaactgtacacgagaaaatctaaataagtgaaaaataaaagaaaaaaaaaagtttataagtgcagttttgttgtgttatttttcagttaaaaatttcacataaatcgcacaaaattgcatataattgggttacatttttgcaacaattcatcaagataatgcattaaaaccttaaagtggttctattaattaatatatgttgtaaattgtatcaagttataaaaagcaaaaatttctctccaagccatttttgaactcgaacttgaaacaattaattaaattaaaataacctaaaatcaattaatatcaagcttaatataaggtgaattagatagttaaaaaaatgaaaaaatgaaaagaataataggtcttttgttaacaacaattaatatcccgaagccaggtgatatgagtttcagtcttcttctctggaaagcgcccagatccatcatcctcgaggaggaggaaagagaagtccgattttttgaatttccaaaagtgaagattgaaactgatatcatccggctccgagtggaccatactcataatcttttttatgatcagactcgattatattatgtatgaacaggctcagtaagatccagtaaaatttagccataaaaaaattaatctccacacttaattgtatataatatacgtatcaggtggtatgtggtttgatcaattgatcattgttgccacttattataatgcatgtttggtttaacttttgtcatttgtaatccgcgtccaatctgaagcatctaaatggcttttggatcttcttaaatttttgacgcggaaatgaaaaataactcacatagggaacgctgaaacacaaactcactgtatccaacagtcacaattactcaatacataagcattgagcagttaattttaaacttatattatgggattaaagtgggaggtgactttggaggtgattgtcttcctaagcttcattctctctctatatggcccctactttgaaaaattccacttgacatgtagaaaacctcaaacaggtgaacttgaagaaaacaattgtcaatttctgttacgaatagtactctgacaactggatactacccttcatgacaattgacaaagtctctaaagagcaggtgagcctaatatgctatctgcctcacaataattttccatccaagggcatttttggaaacccaaaaatagaatctctcaccccaccattgtatataaggaggcctccctcatacaccaaaccacaccatctcacagaaccagtgtcaccaaccctccctagtgtcatttcatttccttaatttcctttaaacactatggattatcaacttaaaaaccaaaatatagcaaccatgactcaccacctaaaagctcattactatctagttaagcttactcaattgttcgtttcagtatccgtgtgttccttcatcttctcaccttcttccttgcttgttttcctacattacttcaaattctatttctctacattccctttccaactttatacacacaacatagacaagaactccatgtttctactttgcaatggtatccttgtttttgttggtataactaaatctctctccaggtctagttgttgtcatgataataagccttctacgtatattaaaggtgatggttcacaatctcggttttgggttattgaagccaacgagctaatgttggagatagtagaaactgaggaacaaactagtgagcctgatgaacagaacactgcagttgagcaagtaatagaaatagaaaactgtgctgaagaagaagtacaagaaaacattgagaagatcattttggtagatgaaggacaacaaaaaggaagtagcttggttttgaaagaagatgagaaggaggagctagatgaagaaactgaacaattggatgtaggtgatgaagaggaagataaagggtcgacagaaactgattacattctgattgaagaaagcatagaagatgaggaagaaaatgtagaagaagaagaagaagaaagctgtatgttgagcacagaggagttgaacaaaaagtttgaagatttcattcgaaagatgaaggaagatctaagaattgaagctcaacggcaattagtcatggtttgatttagtaacaaccatggtcttcttttttttctttcttagggaggcctagttatttgttaggtctttctccttttctgttccacttttcttgtactttagttgtatgtagtatgcatcccctgaaattttccaaaattatttctatgcttttctcccattggtagcaacaaagaacaggctttggatatgaaaattttgtttaaattgaagtcataaaccaagcacatgatcacaatgttaatgaagtaaattcgcgtatatgacacattttgagtatataatcaaaactatccccttccactaaactcatttaatctatgcgatacactgttaggatttaataacatgatgtcatgcatcgaaatagaaataaatttggatactgttattcttaaatgataaaatatgatcttaatagggtgaaaaggaaacaaattttattatgtaaaaactcacgtgatttttttttatcataggaattgaaaataattattgaaacatttataataattcacgtatcaaatttaatcaattgcctcaaaacttatgtgattgttgatagggtccattattttgtattttttgataaaaaaaaattgtaacatttcagccgaaattttatctctggcaacagtattttgtcgtagcttgacatgcaagagagaaattatttgagagtggatttgatagttccaattgttttattaaagaaaaattagtaatctgaatgcaaacaaacaagtgatttaagaacagagattgatatttaagaagaatgtcagtactatactatgtttatagcaacatgttcaattagttgttgaaagatgagaccacaaatacaaaccacttgtctggttattagaacttatattattgtctggccaacaagtggtatctagatcgaagaaaacctgttcaactgtggttgaacttaaacagtctttttctgtatgatccaacagtattacgaataattgaaaatgatttgcgattttattagccagagcaaatggtacacgatcacaaatctgattcatacaggtcagcccatcagttaggtactggcttatagctaagaaagataatgcaaagtacaaaactgtacgattttattatttatattattattattttaatttatctatttggtttattagatgcctgttgcgaaatcgacaagtataccgttcgttcaagtaataaaatgataagtaagatatcgttcccacgaggattagtacaccgattcgattataacttaaatctaaaagttggatgaacaaatatttggtaaaaatgttgatcgtttgtttgaacaagtaaaataaaatgatatttgaaagcataaactaagttatgaacaagaaaataagttttcacagtataaacgaaacgtagccaaggcacccacactcgatgttcctcccaaatggtccgtattgcgtacttatattcgattatttaagctatttagcaaatatgtgtatctaagttcagttgtttaccgattcctcagtgaaacaaccctttaacccacttgaaagttctaatcccttagtcaccttcctagggttaagcattaagtaacataatgaataagctacccacatacattctcattcctaggtaatgtaaagcaagctaccacacttagttccaagactagagtcccaacattcctattgtgaaccctagctctaaaacctttaatagattgatcaagtctaagaaagagatatgaacattcaagcaaagtgtagtaaaatagctttagataaatgaataatagcattcaatacaacccaaatgagatttacatcaagtgtttggccctagctacaaaatagaactagccaaacctattcatggttagccctgagcttacaaaatgaaacatgcacagctgaagcacaaggaagaaggagatggagatgggtctccacttgaaccttcaactctcaagccctagcaaagcttcccaagcttctaaaacccttgctttttgtgtttcttcagtccaggagcgtccttcaatgctgggagtgaagcatttataaggggaaggtgaaaatccaattctaccccttatcagcttttaaaataacactgcagcaacacccgcgctggtggcgcggagtccacgctgatggcgcggacaggcagacaccttggcgccaatggcgccatgttcacgctgatggcgcgagatcctttgccttgatctccttccattgtggcgctgatggcgcgaatctcacgctgctagcgtgagatagcagtgaaatttcccctggattggcgctggcagcgcggcactggcagcgcggctctggcgctggtggcttgaacttccagagttgatggcgcgagcagcgcgaatctcacgctgatagcgtgagattcttagccaaaagccttcaattctccagttggcgcgaacggcgtgggaccggcgctggtagcgccaatgcttttcttccagaggcttcttaaattggtttcctgctacaaaaactgttcaaatcaatggaaaagctagcaatgaaggatttatcaccaattatcacaattataggcaattatggactgtttgtgcttgatttcttgtttctgttggcttggaaagtatcatatgctaggcgcatatcaatgcctttttcccccttaaaaaaaatgtagttacttttacagtaatttaatttaaattccttcttttgtgagagctactataattttagttagtgataagtggtattatgaagatgtatgcatgaaatctacaatttactatcgttgttaatgtctgtaaaaaacccaccttttacaccctacaataatattaaacaatgatcatttgtataaatttcgtaagatcgaacacttttagtacacatagtaggtatgggaatttttttattataaagtatgatacttgcatactatgccaaaaaccaggtcttttgtaagtacttgcatgtttagccatttatgaatggttatttatctataacgaacgttactgtgtctcaacgcactgtcctttagttattattctttttacttccatccaacacggaaaattcacattttatgctttagaaagattgaagcacgtatggataagtctcacaaagtggccaggactaggagcaaatgcaagtcaatgattgcatgcacccagcataagacgaccttatgaaagtgaagtttcacaaatatcaaatcggaagatggcccaggaatatatcaatacatagttgacacagttctttcagtttcatagaattgatacagaaatcttatttgggaaatctttctaaattcgataaacaaaaacttcccgcaaatctcaaacgtttttcttaatttaatccaagaaattctctagtcaagagagtcatagactaattcttcaaggtatgatttaatattcgtttaaaaaactaacatcttctaatatatgttttcatacacttaagatttaatttctacccgcatacttatctatcaagtatttacacaccatttggtttggtttgccctttaacgttaataggtaacataatactcttgaagttgaaggcacttaaacaattgagcaaaaacaatgatatttggacatccaactttttcaaacattttattaatattcatcatttctctctatcttttttttattatcacattatatcacttatcatattatatatttttctctcttttgtgtcttttattaggtgttaaataggcattttgtctccaaaaattaattttgtaaacaattatagcctataacaagacacggttgtgaaatttctgagtggtaagtatagccaggtttattaagcgatattaatgcctatattttcatatgcataatgcatccgcaaggaacagaatccatcaatcaaacttagcatgcaataacttttttctttgcaaccagatacccccatgatttatctatagtttcacttttgcataaaactgtaaacaaaaatgtaactttgatgtggcaccttcattcccacacataaaatgtaacttcacccgaaagtttaactcagcactaccattttctggacccttctcaaagtcaaacccattagaccatgttacagctctgggatattctctgttgtccatcccatattgatatctgtgccaggaccaggagaaatatggtcctagacggcctaaaacctgagggattactcttctgtgctcaatatcaagttgctaatatctattcatgtataaagacaacaaggacaacgcatggtatttgggaatagtacaacttagagacttgaaacaactacagtaagttagtataacagcataagaatagagagagttttgtttttttatttctgaaagcaacacaagggtttgtcaattacatgctatggtacatatggccaaaaattcataaatgtcattacactgataaggcacataaaactatgggcctttcattttcactgccttaaatggattttgatcaaatgaagctaagtcccaagtggatcctccctaccaaagtgaagtcagtctcgaaagtgaaaggttttttgtttgatatttctctctgtagagcggatatcaaggtgggtgagatctggaaagaccctgccaaacttggtgggactaagactaactctcacgagacaaaaactacataatagtagtaaagtctaactatttaagatatcttccttctagataaaaactactatccttgtgtcctacaaagtaccgattcatgcatgcataaataaggcaataattaatacaacacaaacaaagcaaatccaagatgaagaataaggaaaagtgcatgtatattgttacataaaaaaagggaagatgagcgtccacgtgagcgctaatatatcatgtggcaagggtgcttctcacagataaaattattgattagttggcttagaagaagtcgcttttgatgtgtaaaactaagcatatgaagttgtgttcataaatcaccttgataatgacagtagatatgattgtcccttcgataccaataatgcatttctatatatattcaaaataatgaagtggggtcttttaattcggtggcttagccccttgaaaatagagttattaatctcatgaagagaatgagaactgggaggtgtatgcttgcaattgatttacatcacagattttatgtcaataatgcgcttgaaagcaaatacatgaatagaaatctaagtggagtgcacacgtggtgtacacgacatcttttgggggactcttgaaagtaactactagtgttttctgagatgttctaaattctagcatcggtagactctgcatatgtaatgttaagtctaacaaagcatgttaaaaggccaacttaagtatatctcgagaaaacttattaggattttttttttctaacttgtgtttcacacttacgtgcatccacaacttttgtcttttaattaagaggatactctttgtataacattttttggtaacacttttttctcgctatttctattacattaattatcttattccacccttctctttctcttctttatatctttccttttgttatacacaaaattgtataaatttattatacaaaaaaatgaaagaaagttattaataagtttatagatgatattatgagcaaacccgtaagaaaaggataacattatgagtaaatatttcttttctaacaaaaaaatgtcacttatcgtattacgattcttaattaataaccactttgtttgcctttttcaataacttcggatctcattaatctaatttagaaacatatacttaattatttaatattgtaagcgttaaaacaaactaaacttaccagagtattgatcataaaatttaattatttactacactcctcaaaggttaccatttttttattttggaattccattacatttaatattgaaagttttaaatacaatacaccaattaatatactcaatcaattaagtaagaaaacatggtttcttaaacagacacatatatatggcttataaaataatattaatcattttaaaaattattgctttaataaaatttaacttaaaattaataatgcctcagcaaagtaaaaacaaattgactttattatagttaaaaaatactaaacaaaactaattatgataattcagtaaatatttttatatcttaaaacctgaaaaaaaagctataaataaagttagaataattttagtaaattatttattaaaaaaaaaaaagacttattataggattcactttaattgtggcatgaaccccaaatcatagcaaataaatgccgaagaccattacgttccatattgcttataaaaccctgtcttttttataacataaaaccctgttcgatgttcataaaacctttaaattgggtagacaaatttgccccaaagatcctaaacagacccatttctaccccgacatgccaataagcccattcccccacggacaagtgacaactaaacttaccatttgcaaaacaagcggaatttcgaaaacacaaaacaaagacacgagtaataactttgtgtgggacgcgagtcagctagaaatcgtttaatcttccagaatgcgtaacaaatggcatgtactgattatgccctagtccagttgctggtacagagcttgacacataaatgtccaacatgctacattatcaatttacattcaattttcgttggtatgtaagcctctcacaagaatgaaaatgcgtgcacagataaagcttcaatctcaaactttactcctctttgcagtatcaactgtagctccaaccttcataacaaacaataagatacacagttgaagaaaacgacaaatgttttggaatgtatatgaacaatacctccattgtggtacctccctttgaaggtagcatctaagtaacatggcttcaacttttcttttgtctagaaggaatgttgagaccacggtatttataagatcagatatgtaactaggtcgatctgacgcattacaagtaatatccttatttaccttcagcagtcaagggaaggagacactgatttggaacaaaatatctctcagaatcagaaggaaaagctccaccaagccagtgtatctccgggacacgaagatgtttcgtgtcatacgccatttgctaacataatcgtggggaatagattagtcaggcaggatatgaactttaactcagccatcacagagattcaagtgactcaatgatcctgtacattttatattcagatccctataatgatatacatgttgatgcatatcttaattaataaacttataaatactaaccattgaaccgaatctgtaagtggtcaagatgtcaaagccatagggatcacaatctaccaaacaataagcaggtagacgcaaattctcaaccagaagccgcaaaaacctgttaggatacaaacagacacattcgcaatgcaatatgaaaaggcaagctggcaagtatatgaaaacaaaagttcgcaccttcttgtaggaatatccgggtagcctcttccctgtataaagatagaattcaaacaaagaaatatcgttgcaaacgaaactaatgtcttcagaaattgcttacagtgatgacaatacagcgatttgcattgcagaattggtcgtttgctagtctttggaaaactgaaagtgaagttcaacatggacggtcttttcaatagaaagtaagttggggaagaatcttgtatttttttcctcttattgtctccaaaacaaaaaagcatttgcttacctgattctttctccacaactaatatgtattgagcaacactaatgatatctatgcacaaggttaagcaacgtttttctccatttcgaatcactttgcattttaagttaatatgaagtaccaaataaaattataagaaggaaactaaacgattgcagtattttcacccagaaaataggataccttgaagttcttcaacgtgaacaggaacatggtgggcctccagaaaagccaaatgcctgcatataatttaaatggtaaaaataattactacattaagatcagttcttagttcttacagtgttgggagaacttatgcaatcaaatatcctttctccttcagtgaatcttatccagcccataattaacctacagcagaaacaaacttgatccataagtcttaccacttgcttgttaaacacattagcacacatcattacaatatgaaaaactcaataaaaggcaaaactatcagctttgagaaaattaattaataattactactgcagcagtagaggagaattttgatgacagaatgccacatatgccagccttattaatgtacgtttaatggaatcatattttctcactatcataaattataattataatatgaataaaaacaggggatctcataaaaatacgtgtcttttgaacttcatgaaaaaaatttagacacgccagtggcgagattgtattttatacaaaaatgtacacacattcatgaaacagtattatatgtgaaaataaaactactactgttattattattaagaaaattctgacaacaaagtgaatttttccaagattgagggtgatctcattttgtacccgttccctgcagaaaccaacaaaaaatgaaaataaaagaaatataagcatcccaaacatttaaaccttaaacattgataactttctgtttcaaacaaataaataatagaaaaacaagcatatcagaaactcagatagaagttttattcaccaaaatccaccaagagccataccaaaagaaaaatggcaaaaaacgatagtgcgaaaaactaccgtattaaggttacggtgattgcattgcataagaatacatatatcattaattgcttggtcaaccactgactgatctgcattgaaacaaaaatcagtatgtcattttaatatatgaatatttgattgaacaggttaatttgttttggatcaaggttttaattttgcataaaaaaaattgctcaactttaccgccaatttcttcctagcctcttacgaagttacgtccacttcagtttaaaaaacaaaaaataaaaatagtaaatagtgtaggatttaaaactcagaagtcagtaataaattattatgatttatcccttttagataaaaatttaaaatttattccggtaaaaataaaataccctctaacattaatttggccccaatgatactttaaaaaattactcacattgacacttggtaattggctattttctcatagtttacatacattgctttattttgctttgtatgaaacaacatttatatttaagcaactcacttgggacttgggttattaattactgtatctaatactaatattttatagctgttcatatttttctttgatatcattatctttttaactttaaaaataaaaaagttaaccaattttttaatgtatctcacaatatacccaaattagatcatcttatgccctgttggctattgtttttgcaacaaaacaaaaaatcaaaaggaaaaacacgaaaaaaaaatggagaaagaaagacccaccatgtagaaatgaaaagagattggatagagtaggggctagacattatccattatcccagtccatgtcctgaaataccttactcttctatattttctatctctaattattcaaaataaaaattttgggcctcacttttttgtagagaacagttgctatccaagggaccaaagcaactcaaacattttctctctcatcctatggttgctctcaaatggtcaaatctagtaaaatgggttgttgacagagttatttctatttaacactttgtgatagaggtgctctatatgtgcatatatttgtatcgactagctgtattttaactgattataaaaatgatgaatataaaaatattgattaaaaatacaattacaattcatttgacgaactattcaacaatcttttaatcataattaattaattatagaaaattgcaaacatatgtgaacacaacactgaataaccatttaaaacgagtcctaaaacttcttagtcttaagttggtattctctaaaatatgtttaaaaaatatatacattaggctgattagttgcaattgtaaaatctaaattagtaacatgattatcatcaaaattttgaaaagactataaatatatatctttcaaatgtaaatattactttgaaaagattataatttataattttttttattaacatgttattagttcagagtatttagtggctttttatttatttatacttattttaataaatcttttagtatgtcttatctaaataggttccttttgtctcattttaataaattttattattaaattcttaaaataaatatcatttaataaaatcttactgttaaataaaatataattaaacaatttatagtcggcagtcatccatgaataaatgggaaaccatgtcctttttcttttccgacaacaagcctcaaaaaagaagtcaaaatatggttgaaactcgaaagaacaactgccaagtggggcgcatatatgggaacttaatttttgtccttttcaaataatttatttatttttatattaaataaacaaaatctctttaacgcggaattgattcatgattaattatggagaagctagatcatatgggatccacttgcattgaatcacaagctttcagaagccttcgccatactcaaatctcatctccttcagcaacaacaacaaaccacttcaaaggttagaactttcctcgcaattacgaattacatttgttgttattgtgatgggtttgttttcctcttggcttcttagttcaacacatgtctttctcttactagctcgattcataattgattggaatttccactgcttattgtttcgttttaattctcttttgcctgttcacttgctattgattagtcatccatgacctttaaattttgcagatttattctctgtaaaaaagtgttagattgaacttgtgtagcactgttgctatttctggaaatctaatgctccttgacatgaactgcagttggataagtctttcacatgatcaacctttaagtattaactgttgtcctcaactctgatccactttgttaatttagtttctcccaaatttaatgcatcattattgtcttaagtcttagtcaaggaggttttttttttttttttaacttttagattgtgatcttcaaccatatttcatttctttctgatggctcttgcaagttacgattttgaagggatacaccccgacttgtttgtgtaattttgggtcactgtttttgggaactttttttgtcttggaggattgcccatgaatagaggaaaatacttgtgatggtgaaattctgtgagatgactaatggcccttttattctattttttttgtaatgagaactaaactgggaatgttcaatatgatgaggctgatgtaagtttcattagaatttgaatggatttgaatttgaggttaagaaattgagcggtaaataggaagtcctagttcactagttgcgtttgctctatgattattatttttttggcatgtagagcataatgggcaaattcattgtatttcaatgctattatgctacttttatggcctattagttattttgcttacaaagtcactaactcagaagaaatggatgcattttctgccttttctttaaatgaaggcacgcaatttaggagatccatatggctcgtatcagttgtaagtgatgatccaaatgatttcattttgcatttgtggtggtaagctcaaagtagaacttggattgatctctggcacctattattatagtatatatttgagcatactagtttatttttttgtgaaagctctttggatgaatttatgtttcatgcttcatcatttaaatacttaaaagtctaacaatggcttatggatgttcatttacatccctttcttatttgactgatgttgctagtttgaactgttttgcaattgaatcaggtcctatattgcagatccttgttttctaaattcctctgcatggccaacaatggtgtaaaggagcccttgctgccggtatcacttgatgcgactcaaaagactaaacagcagctaaacaagagaaggctcctccgctttagaagtgctcctcaagcagaaattgttcctactgggacaaatggcaatgaatcaattccccgtagtgcgtccatatttcagaatttacatccaagctttaaaagagtggctatctatcttgcagtctacttaggtgtaggtgctttaatcttctaccttgtcaggaaccagattaaggggcagaaaacagatggaattcttgatgctttgtactttacaattgtgacaatgaccactgttggatatggagaccttgtgccaaatagccaccttacaaaactacttgcatgtgcttttgttttctctgggatggcattgattggactaattgtaagcaaagcagcagactacttagttgagaaacaggaatttttgctagttaaagccatgcgcaagcaccaaaaagttggttcaactgaaattttaagggaggttgagaccaatagaacaagatacaaattatttctagtctttttccttctttttattctcatcatcgcgggcacaatttttttggtcacggttgagaaattggatgttattgatgcattctactgtgtttgttctacaattacaaccctgggttatggggatcaaagtttctcaactcaagcaggaagaacatttgctgtgttttggatattgacaggtactattactttagctcagcttttcctctacattgctgagctaaacactgaaatcagacaaaaggaacttgtcaagtgggtacttacaaggaaagtgaccaatttagatttggaggctgcagatcttgatgaggatgggactgttgggttagttgagcattctttcaaagtcatatatattgttatactatcaattataaaacatgtcttcattcatttttatatcttttgttttgtttctcatagggctgcggaattcgttatttataagctcaaagagatggggaagattagtcaagaagatatatcacttgtgatgcaggagtttaaacagcttgatgttgatgattctggcacactatcaatttctgatataactcttgctcagtcatcttagactaacacattacattgcaccaagttggtgcagagtgttcttattttccactttgatcacgtaatgcacaacacaccagagctttgatgaggatggaaaatctgaaatttcttgaacggactggcgattattggtcagtctcatgctatcgaattattgactacttgatcaaggagcttcttatacatatcatatcatgtaagtatataagcttaacagtttacacttcagttcagagtcttttgtattttacagcttaatatacatagatcaacttggaacattcaattcaaaacacactttcctcctccttggtttacactttttcttcgatcaagtagaatgagctcggggcacggatttggaggttcaacaacatcaacatcaacaacacatttaacccaagttattacatgtaatttttttgggtgggtgttgacacacaaaaaaaaattgagaatgtgttgcatcaatgcatttggattgtgccagcaaaactaggtcatgaacaaaattttattatttcttcaatttttgttaatataaatacaagtccaatcttatcatcattacatgaacaaaaaataaagatttttttttattgctccttttctctctgttttctcttttgtcaattattttatactttaaatttttttgaaaacaaaagacattttatttgttttttcccccacaaataatagctcacaaaagagtgtttgacaaatcacttttgtataattaattatcaatatcacgttattagagatgacccaataggcaaatatctctattgaaaggttgtttaatagtgtgtttggaatatgttataacaccatgttcattccaaaattcacataaatgatgcagaagctacttgattttgctttagatgaatgtgtggaaagagaataatgatccacattgcaaaaatcattccaaacaagtactaagagcatgtttaaattaacgcttagaagacattatttaagtttatggaccaaacatgacttttgcattgaccaagatatttggatgtttattgaaaacataattctaaattgtggactcaagtcttgttgaagcatttgaaagtagtttttgcatcaagtctgactagagtcataaaatttgttcaaaatgcagtcctctttaatgttaatattgtcccgatgaatagcaaggcaaagcacattttgttattaaaacaaaaaatcatgttactacgtgctcgcatttacttaaaatcaagtcaaataaacatatatccaaatacgctctctaagtatagtaacttgcttgatcatattgtgttttgatctcatattggtttgaaacaaaaaaaaagttatttattcaaaataaatttatctaaacttgcactaatttttaaaactggtaaccttatgattaaatagtacaattagtaagcaaatgatatgtaaaaagacttttccgtcatagagataatttcgatgcgaaggtctaaaggatgaattttagcagtaggattttaaaaggtgaataagtatctttcatccaactcgtaaaacattagaaaggaatcagggaagttattggtatgaggaataaactaaacaagatttccaattaggttcttcaacgagaataaattatcaataaaatttgataaataaatatttcttacaaataacacaataatccaaaaataaaaaatatggctttaaacgttttatttacgaaagctttatgaggttaatacttagtcccgagtaacagatgaaaaattgtgctattattcatggttgagcaactattaatagtgcacaaaattatagaagtaaagtttggatcaattttacccccaaaaatgtttttaaatttcctttaagaattgtttgaattgtttaaagttttatatccaaaaaggctttttttcgtcaataataataaaaaagacgagagattttttttcagaatcttatgtggtagaagacttttattttctaaaaaacaacttttcaaattattataaaaaattaagcatgggttaaagttgtccagttgttatctactactactggttttttaaccctttatatatgatctgatcagaaaggttcctggcttgtttgttgtttgcaaactgcagtcaatttcaaaaaatgatattggtccaccaataacatcaccgacgaatttttcaaacttaaaaataatggcatttgcgtacccattgtctcctatgctatcagttatgcatcacttttacacgattatacccatctgtaaagacatataatccgattcacttgcaaagacaaatagctataaatagattcaacacaattcgtacataaaatactaataaatttggttttgtttcaattcaatcttatcatatcaaatttggttggtgtctgacattagcagcttggcaaaaactcttttgtttgcatgaatatcattgctttaagtaaagttaaatattttaaaatattcttaccgggttatttcagtgtaagattaacagattattactaaaaagagtaaattgcgctttccaagttcgatatttaaattacatgttttttcatttttaaaaaaaatatacatacatcttcattaaaagataaacatatgttatatatgagttttaatataaatgaacattttagattattttttcttatggcgattctcaacatcattaatagccttttttaaacatctacattttattttgtgatcttataaaatgagataaatattttagataaacaatttaagttaataataagtgtttaaaactttactttattttctaaaatattaaataatatttagattttaaaaattaattgttgaattaagttgtaaaaaaatcattgaaacacacatttatattttttttctgaccaaaacaccagtaaaaaataataactatcaacaataatgattaattataggctcacactttcatatttattcgtcaatttgaaaaggtttatttatatgcaaaagaattaaagtatcacttatattaatctctcaagcgaaaagagtatctattataaaataaacaaatattaattagtgtcctaccaaatatactagtggagtggatagcagaaggtagctcccttcaaaacaagatgattcacaatatgcaaagataataccacattaaaataacaatttttggattaaaaattgtagtatttactttagaattaattaattaatagtattatatttttttctccccgtaatattactttttcagggcatctgaattctgtcccctggctagtaattgacaaatgagcattcagcagcaaatatggatggcacatggtgcattgtcgactacgacggttccataaattcgagaacgattattatattcccacattaaagaatacactttatttagattaacttacttaatactattcaaaataatttacaaccaaaatctatttaaattttaaaagaaattagcaactgatcaaacttaaaaattttggtgtttggttcaactttgaaaagtgcaaattatatttctaaacagatgctaaactttgactattatgatggtgatttttttcatgaacaatgtcaatgaacatgtacggcatatgagcatatctcatcattcacgatcacaccctcactcaaacactgccatcactcaaaaagactctgccacagtcgcaactccatttttcagttcatattttagctaaaataattttaaggaaaaactaagagagttataacaacattaattagtacacaactcaaccgttaagatggcccgtcaagacatagttatagttatccttaacaaaacacaaaagaaagctgccagcttgccaatgatagtgataattataagaaattaaaatcgagtaaaattctgttttgggcttgaaatattcaaaaaatccctcgtatcattagtatatttttaagaataaaaaccatcattctcgttgcgattaatttaactttttaaacattaattaaatgaaccgacattttttcactagttttctactaatacaatcatgcttgaggccgacaccacatgtacactacacacctctttctacgagattaaaattttgattcatgatattgtagactaaactcattaatttcactgatatttaactatcgccttaaattaatacttttgaaataaagatagcgactttgatctgttgaaacttcacatgacttaacttagcatgagaagaagtaaatataattagtgttagattacagccccgtagagttaaatgaaaggattagtgtaaagaagtcttagcaaagaagaagagaaaggcaaggactagagctgtggagaggaagagtggccagaaataggcgaagagggtcatgaatcttggggccatcagtataagagagaagagcagtgccccgagaaaatagtatctgaactttaccaacttctctgggatctccatggccatgtggtgtggagcaagtgagtgtgactcagggttgggttttctgtgcagagattctttcagacacaacaactgtttcttctgctcgttttttggatttggactcaagggaacacactcatttttcactcccataatcatcattttgggtgaatttattttaaaaattaagaaacaaatattcaatgagtttatttaaatttatttgttaaaataagtaatttttatttttttagtatgtttgactgaaaaaaaaatagttttttcttattttaaaaaacaaatcccatttcttaaataatcacttatttgaaatttttaatttaaacaaaacttatcaagtatttatttattaaaataaataaaatattattttttaaacataaacaatttagacgaacacattaaaaaaattattttattaaaataaacatttatttcaataaataaatttaaataaattagttcatgatccctcaaaaccatactaatatactagcatttttcttcgtgaaccgttttgttccctagagtttttacttaaaattaataatgctcgcacacactaattttacacacttcatttctcaaacgtgaaaattagtctattacatagagtgtgtgtctagggtggcagcatgataaaaaaaattgtgaccaatcccacggtgaagttcgagcaacacatagttgtttctcaaaattcacggtcacaccatgatttttaattccacaatcgattatgaaaatcagtcaattacattgtatgcgtatttggagtggtggcacgatgaaaaaaaaaattgtgaccatgagcaacacatagttgcttctcaaaattcacgattacacacacagttcttgttcccaaaatcaattatgtatcttatccaaacacattgaaatgtatgattcaaaaagtgatgagtttatgatcttatgaattgaaagtgagtcttcctaagtagtacatctgtctacaattggtgtgtccctcacacgcttgcacagtttgcattgcactcctctatatttccatgtctttagttgatgaagaaaagtttgactgaaagaatcacacgagtcttgagtcatgactttggcggtgtgatagtagatttgaacattggcttgttacctttttctcattccttgagcttaggtctgcacgtgctaggtgttgccctagttgctcatgatcatttattattttcggactatatattgctaatattttgctggtaagaagaagaagaagaagaagaaagagagaacaacattttaaatttgaaaaaaaatgctataaaaatagttctcccttcgatagaagaagaagaagaacgaatcaaggaagaagaagaagaagaagggactggtggacgccataggcaacacgcctttgactcggatcaacagcctctccgccgccactggttgccaagtatttatgttctctatgatcacttcgcttccattctctttaccaattccactctcaacctatttttatttctcttcagattctaggcaagtgcgagttcttaaaccccggaggtagcgtcaaagaccgcgttgctgttcaaattattcatgaggttaaacaactgctctctatctatttatttcaaccattcgcatcttctattattcactgtttttcatacaattatcagaattgctttcttttggatggaatatcaatttttcattcattctcaatctgatatacatatacatgtaccacctatacaatccttctatatataattgcctcaattatgttattttcacctaagcatatgctatgtttacttaaatacttacatgatatgcacaacttgctgcatgatatgaagatatctggaatctgcttgataacatattaacacacatgatttaaattatgagttctacatcaagtagaataagaagtttaatgtgatatttaagtcatgaggctctccaacctgatgaactagtcttttgagttggacttccctcttatgcttaagtcataacaatatcagccttaagattgtccctatgattgattgcgcaggctctagaatctggccagctacgtccaggtggaataatcactgaagggagtgctggaagccagtggcggagccagcttttacttttaggtagtgccaaattttattttttaggtagtgccatggccccgctggtttcaatgtggctccgccactgctggaagcactgccattagcattgccaccgttgctcctgcctatgggtgcaggacccacgtggttataccagatgatgctgccattgagaaagtattttataatgattgtaatgtaatcaagtaaattctgttatgaaatctagcgataaacctctaagattttgtgtacaattgatgattgtgttgcatgaatcaaccttcagtctcaaatacttgaagcccttggggcaactgttgaaagagtgagaccggtgtccatcacccacaaagaccattttgtcaatattgcaagaagaccagcatctgaagcaaatgagtttgcattgaagcgtagaaattcataacaattgaatggcaaggaggacaccgagaaaataaatggttatgaatctaatggatgcaattacagctctctgttttgaagattgtcaaggtggcttttttgctgatcagtttgagaacctagcgaacttcagggcccattatgagggtacagggcctgatatttgggagcagaccaatggaaagttagatgcatttgttgcatcagcgggtaccggtggtactctggctggtgtttctaagtttcttcaggttcaccacatccccccttcctccaggttgtagatgttgtcgttttgagtgtgaaagttatgtgagttatttctggttctatattcaacaggaaaagaatccaaacatcaagtgcttcctcgtagatcctcctggctcttgtttgtttaagaaggtaactaggggagtgatgtacaccaaagaggaggcagaaggaagaagactcaagaatccatttgacactataccagaaggaattggaattaacaggataacaaggaattttgcaatggcaaaacttgatggggcctttagaggcaccgatagggaagctgttgaaatgtctaggttgttacttactcttttgtaaaccatcctacttttcttatttttcgcggttttttgttcttttctgtcaaacttgaagaaatgatgaaataaagtgatatgttgtttttgatgtatcaggtttcttttgaagaacgatggtctcttccttgggagttcttctgcaatgaactgtgttggagcagttagagtagcgcaagcaattggcactggtcacacaattgtaaccattctctgcgacagtggaatgagacatttgagcaaattctatgatgctgaatacttgtctcagcttggtttgacacagaaagcaactggtttggagttcttgggcatcgagtgagaaggtttcttcagagtataaaattttaatgccactgccttagctgctatatgcttgagtgcttagtcttggatgagagtggacacctagaagttagaactgagggtgttgtagttattgatatagaagatattacacttattaatacaatgttttgggggtattacacggctcattctttgttagtcttcatggtttattggtttattaactaggccaagatgaccaaattgttgtaaactaaatatattcaattcgaactaactatttcagttcggggatgaattaggcctgcggtcttcgttttgaaattaatgaagctggaaatagtgcacggcaaaaatcttcgaatacaaaccaataattcaagtgtccaatacaatcatataatgaattgtaaaaaagtttaatagcgtggaaaatgcataaattattgaagttggacaattaaaatatatattgtgatgacatgacattcaaatttgagtttaatggttaatataaaaacttgcattggaaatcaataagaaatcatcttaactattataaaagttaaaaaaaattgtggatacataacagttatgaatgatattgtaaatgtacattttttttaacaaatattgtaaatgtgcattgagtgcataatttagtttctctttattgaaaattgtataattttttaatcagtaataattacaatttgtacaattgaggttcactcaatttaataattttatcaaaaagaattttcatgtaattattgttcatttatcctttaattcttattatatcataatagttcatctcaaaatctatatatatatatatatatatatatatataaatatatttttttttcaatctcctcgtatctaacattagattcatgtatcattgattttaaatgtgtcattgatgttgatatcgtttaattcttgttgaatgaataacaataacttctgttttaaaagacttatatttggaacatcttgaactaatagatattacattaaatgagatttcaatgttaacagtcaataaggtaggtgaaccttagctccttgatatttttccttgatcaggattagttggcaattgagatcaaggtaagtctccaattcccacaaaagaacagtttactatgaggcaaaatacctttattatcaaagcactaattaataaatttattgtcagagtacatgacctcatacttgggtctcgatagattagatcaaattgtataacaaaaggtgcttaagtggacaatcccgaagaataaaatagctcaaaaaagcaaaatctaccgtgactaagagggcattacctcctctcaaactcagattcttggcaatgtggatctaaccaatccttgggagattcctttgcattgttgacatttaatttccccacacccacaagctccctcaggttatccactttattctccctacccatcccactaattctcttgtcagcttctttcagcttttgcttgaacttttgcttccggttagatgaaattagctcttgctgctttgctagtgaaggaggcgctccatgtgggcccaaatagatgttttcttccttcttagcctagaacacaaacaaatgccagtatcaacatctaaaacctgaaaattatatagtctctaatattaggaaattttctttagctgacctttgatgcagaattagaagattctacatcaggaacatgaggtttattttgatctgagtcttcaattcccaaacttggaatcacaaatccatcagtgtctacaacaaaaaaaaagtccaaccattcaacatcaaaagcaaaagcatttttgtccccatagaagtcatcccaacattgctaaatagaaagaaacaactatccctagtcagaaagtaaaaaaaaactccgaacacagtcacagacttttcattttcatagcaaaacaaatagcacaataaattgcaaaactgaaatatatttatgcataagtatagacataaacaacatgtcaacatgtaataacaaacctatatcaatgataaattctctgtatgctaggacattatgattcctaccctaaatacctctaatttacatgaaaatcaaacagtgttaaaattgaatcagctggatatcaaattaagctagaacaatatgccttacacacggatgtgaagcaccgagcgccacaagcaatatctccggaaaataaaatccagataacatgacgaactctcaagcaatagcagtgaattaattaataaccaatccttgtcaaaatcaaatgagatcctcatatatgcaataaatcaacaaaattcaatctaatgcagaaacaaataaataaataaataaaaacaacacaaaagatcctaatttcccccttctctgttccggtttggtcatccagagatcaaaagagaaagaagaaaaaaaaaagagacgaaattgaaggaaaaatggcataccccactcgtcgtcttcttgttgttcaatctgatgagagagatccatagtaaactgacgaccatggatttcaatgggcgataaagcccgattgaatagatagcagcaaaatttcacaaacacaaatctcgaaagaataaaacacaaaaaataaatcaaattagagaaagatgctttcttgtggtggaaattgagaggacaattaaaccctaactatagggtttcactgtgcacgtttgtttggtttgatagctggtaaatgtcatactgattcggacagaattgtttaaagattgaagggcagttttgtcactttgattctcaagtgggatattctatgtagtatatgtttttttttttttcctttattggtagaataattgatagtttataagagataaagattagcaattgtttattagataatttttaaaagttgtccttatatgatattattattttaattccgcatcaacattttagtattaaatgaaaaaatgtccttgttaaaactttaatatgatattcaaatctaattaaatttctttcaaaaaaaacattataaaaagtatatcattaaattttttaaaaaatatttatgaattaattcattttatttgtcaaagttgtaatgatattaaattagatatttatttttaatattttaattttgattcttgttccaaaaatattttaattttttaatttcttttttatataaaagattaattaatatcatttttattttgactcttacatggtaaaaagaagaccggtaaaactttgactgagacttgaaacatgaaattttatatgcagagttcttttaatgcataagttaaaataaaataaaaataaaaataaaaggattaaaattttagtttaaccttattcgtttcatcatataactctttgggaggggaggggtgtaagaaatgccaattttatgtattaaattaataggtgatttgatattactttgttacttatatattaaggaaaatgtacataaatttcaattttattgtttttttgtattgttcatagattctattctaatcaaatacaaattggaatacaaatatacaataaataataatatatccttattttaaatttcatcattatttaattatctatgtgttatatataaagtgagtacgaaactaattaagagtgaattgttttaatttaacttatactcttaatatgaatctaaagaatgtatgtgttaaaacttattaattaggaagagttttaccacctttaatcatcttatgtttgacaactccgaataaggttattaaaatgttataaagtgatatgtagagtacttaggcctctttattttgcaccagtaataaattatttttattacgacatacattttgaatgtaaaaaattataattgagagtaatttagacacttatcttaattatatggtattacaactcgaaatcaattgcactcaactttctgcagattggcttcacataaatggtgtattcacagcaaattcgtgagaggtcatgcttgtggttgtggagggaagatggatacatgaaatatggtaagcacatggattttggactgatgggcatgatgtctacacgaatccagtttctataatattatttaccttgagtggctttctgttgggtgcaaatggttatggttctttttcattgcaataaaattttctggccttcccaagaaaaaaaaaattgcacccaactttcatataaaaagaagtttaatctcacggtttagcaattgttaaatttctgtttggttcattaatcaaatgatgttgcacaaaatattgataaaaggttaataaaatcaaaatattattaaataaatgatgaaaagtgctagacttttataagaacattaatcattaaggagtaggcataataatcaacaagattttccaccaagaaacacaatcaaagtcacgagaaagcgcttgagtcatgcgatgtctttttgtgaatggcctctgtttccacgattttcttgtcttttgttctctttcgtttctcataataacatcatttctttgtaggcacgagcaaatgattatgagaggggattaaggctaataattgaatacaagaaggtaaaaaagggtaaaaaaactgacagggacattcaccttgtttctgatatgtaattgcaaatgcttttctagaaatcaataaaaagataatatgaattgaagtctcttaccaattttttgcttaaacatgagaaatatgcatgtacccaccttgagtaattgtcatctgtcacctatgcatatggtacattattaatcagtcgccatttaaaacttcgaattattcaccaagatttgatatacttatgggacagaatatttcaacattattacactctgacacgtcataatattaattgtgtgagcattatccatcacaaaattgtatttctaacacctgtcctaagttttattgatttttttgaaattactgacacgcttaacagcatgtgtaacgcgtacataatcacactaacaatagcacaaagagatttaaggttgaacaagaagttaaaaaaaaaaaaaatcatagtttcaaatctcgatatttttaataaaattaacaaattaatatttattgaataaaaaaaactaacggtagcaccatcttactataaaatagtaattaagaaaatgtattaattaattttctgcttcataaaaaatagccacataaataaaaagagtcttcttcattaaatacaagtagtagtaggtttagatcgatctaattaaaaacaaaatctaggcatctagctgtataagttgctgaacctacgtcttccttacgcaagctcttgaaaccttgtaccaattggcaactgtaactaaattgtcctagtagctgatatgttacctagtgtggaacaggatatatagtaatggggaatacctaactatgtagttttagacatcttctgtaatggggcctccactccattaaagcctgcatgagcatgacatgctgaagcagaaaaggacttacttcttcatggctcaacaagagcctaaacaataatagaaagtgggtcattgttacagaatattgattacttaatgtgcctttgttaattaggaattgtagttgtaggagcaaagttttgtcaacctgccatcacactcgaatcctttcattgctaccaaaagaaaggaaaaaactaatatgaagtcaaacgtttctttgatgtatgtgatggggggaaatgtcatactaggaaagtgtctcaacaaaagaactcccacaaagaagtgttgttttgagaaatttgttgttttttcctgatttggtatattgagtttctgtgtggttttgtttggttgtgagtaaaatagagggagaagcaaggcccttcttgttcttgagttctcttttgatgaagtttgttttgttgggttcggtatcttggcatgtgtgggggaggggtcagatatgtctggcacatgcattggacaaatccaaggctttgaggttgtaaatattgttggaaaacaaacacctttgctatctccaagaggatcagatgcagataataaataataaaaggttttgtgtcagaggaaaaaaaatagaagaaacggttcggttaacacttgccagttggattcctagctagtagagttgctcagcagtggaaaggaacttgatctttcaaggatcagatgtcactaaatgttacccttgtcaggtttggtgaaaaagagcatatttttctttggggttcaagccatgatcttttgagtcttattgaaaatataattttccctcctttgctccctgtttgacattttagcaactgtttattacaaaataggaagcagggtaggagctgaaagttatcagcattaacttatagcttaaaagactcttttgactgtcccaaattcctttgtagcacattgaaatttttctctatctttgctgtgtcacaatctgtattttaaagtcataaaagaagtacagaactacagattgaacaaattttcagccacttctttttagtctttcccagtgatcttcttctccttttcaacagtacttcttgcagtctttgttgggtgagttggatctttgcatttgctttggctttgacacaacaagttcattctagtgaatgatcatggtgaaagtaacaaagcaacaaatctgtcacaatctgtgttgttattttgccagtttcttaccaatcattctagttcttgtccttctattttcaatttcctttttcttttcagtttctgaatcctctccttcccttcttacactactgattgctcttctatctaccttgtttcttgtcacactggcaaagaaaaaagggtccctacatgaaaatcttgtccaagataaccaaccgaatttggagttacagccttcattgggagatgttactatccaacaaaatgaaacttctgagaggcaagctgaagtacactcagagtcctcatttccattagattgtgaaagaagcaatattatggatacaagttttgaactaagtgctcggaagtatgagcaacaagctgatccacagtcagatacttcacttccatcagatagtgaaagcactgctagctcaaccatggatgaagaaagtattgagattcatcgcaacagaaatcaaaatcttgatatatctgatagcttggtctttgattatgatgttgatggggaggaggatggcttgattgaaatcaagcttccaaacaaccacttttcagagttcttgccagaatccattttcaagcagcaaggtctcacagagctcttggcagaaattaatgagatgaatgaggacgaaaatttaattgagattgatatttccaagggatccacaaagtatcaagatttgagattggagaaggagttggtttgcagattagatcattgtgttcttagtgattaatcttttattactaattgttatcttgagctgttattttaggtgaggttttagtcattagctattgtccttcttgatgtttaccaaaattttgttctcttctattaacttggcgttttaatcttaagccgtgttttttttaattaagagttagttcaaatctcaatcaaatctcctaattttatctgtttcgtaacattaaaaaacacagtatgattatgttttgtttgtatgactatagattaggagtgaaaatatatatcagattttatataaataagtctgatttattattaaaaattaaggtgtagtttgatctaataatctatcaacgactttttttcttttttttttttaagtttgatttgtcttttttaaaaagtttagtatgatctattagtttacttaaaggtcttttatctcaaatatttattttatttgacataaaattattaacttattaaaatattaaatataaaagcataatacacatatattaatttttattatatataaataaattagtatgctaatctatcagatttaatagatttttttataaactcacgtctaacctatttaactaaatgaattttttttaaaacttaaatctttttttttattaaacgggtcagaccaaagtgattgactctatgcatgttaaacctatttccttccctaatttagatacacaaaggaacttttgtgagtgcttgtcatcaatttgtcttattattttcctcttttccttttctcttcaaatctcccattccctctcatatccgggaaactttatttactatgcaatcatgtgccaagtgtatctgctgactcaggctgtgcactttgcatgttacaagttgcaaaatataggctttttttgccataaagtaaataacagtgctttaacaaatactgttatttttaaatcatttaccaaactactctcgattttaataagtagttggacaaatatattatatttgggaaatctacaatttactatcttaaaatttgaactaaaggttttaggaccatgggtgacaattactatttttaataattggtgattataatttaaaagaaattttcttttaagagtagagaaataggtaattttgacgagcaatttgatagtttattttttcaaagaagggtcgttacaaatttttttcctagctattgtttttctagctttacaaatatgaatccatagcattttttattaaaaaggaatttatgcataaacaattaaactagtggcgtggtcctaagaggacttatgggttattagcccgttgtttacatgggcttaataattctctgacccataaaataagggccgagcttactctgcagcagtcaaccataaaggactcactggaaagaaaaaccagaaaggactcgagtcttgactgaaatatatacatatagaaaagaagacacagaaaggatgcaatcgagcatttaatctcttatccaaacatccctttctttcggaatatcaacgcaggttgaaggggtttaaatatcttcagtatttaattttttaacttgtgtcatttgactttgtttctaatacttatctaattttgagagattattttcttacttatcacgtaattaagaaaaatattgtgtggaaaaaatcctttctaatttaaatgagcgtcttaaaaaaaataacactattcaatgttaaattatataaaaaaaaatgcaatagctattttttatttatttttatttgagaaaaaaggatatgcattttatatactattatcccataataaatttccattatagtagatttgttgactttagaactaattttaaattcattaacttaatatttttttaatgaaaaaaaggaacgttgtatctgtttgaaggttcagactctatatatttagagtcgaattatgtctatagtatgacacgagttacttttaaaatactacattacatatggacgtataataaagacttcacacgagctaaaacatttaaaactcaattgaatttgatatattctagttttttgtatccctaaaaaaaatatgcgtaagaaaaagagttgaacaaataaaacgaaacaaacacaaggtttggacatcacatcaataatagaaattaaaccaatgatgcaagggtgggtgacccacttagcacccctaataattgatgtttattagtggatgcatatatgcaaagtcaccatatgtgtatgtgaccactgactataactaaactagtgtcacccatttgcttacttgaaaagcctatgtctccaaatgattcaaattattgcatgagagtgtccgtgggtgggtgggtgatgtgaatatataactcactgtttttttttttttttttttttttttacaaatatataactcattgttctgcacctcttgtttgacctattgtaccacaagttagatgactaacaattaactattactatcactttggaggccattatgggaacgttttcttcttcatcgttaatgcaagttatgagccgattgttgattcagtttgtggtacgaggttgtcatttaagggtatccttatcttaaaaaaagatataagtagataaacatttcttttaaatatttgggaagtttaactttcttctagttgaagatgaataatactaagtagggatgtttatgaatattagatatatgcatatttgaattgacttaaatgaattcaaatagtttgggtttttttgtgtttgggtcaaattcactcaatccattttaatttgttgaattttgggttagttacaaattttaatatatgaactagttgatttggcttattaatttgtattaagttattattattattatttaaattaaaaaaaaaatcaattactatttatatcatacataataactaaaagtgagattatttatcttttcttagttttcacaagttcactcaatcactctcacaaaattaaggttttaattctcagttgattgtagaatatctattttatttttaattttgtattaaaactattttagatttagttaaaatttcagctgcactactcatttaactatttgagaatattaaaattttaaaactatgatataacaactatagtttttgtatttttaggcttcatgagtgtgattattgaacttgtttattatgtttcaatttttaaactatatttaacataattatgttgacctatgtgatgatgatgacaataatgtaattcctctccttgtcttttcttccattccttgtcttttcttctagtatttaactacacgtaataattataagtaatgtattcggtattccatttaataaaatttttagcttataaaaatattaaaatttaaaaaataatagataaatttatatgttttgaccttgttgactcaacccaatccaaaccgtttacaaatgggttgatttgtgttttaaatttttttcttggaaaattgaccaaaattaatttgattggattagataatcaatttcgtcaaacccaattcaaattgatgtgtgtacacccctaatgttaagttcattgcatgaaaaatagtaaaatatttgtagttaaaaaatgtatcctaaatatttgttagagtgtaatgaattatgttaaaactaaaaaagaggtgtagagagattgaattcattttatgtgaaaattaatgcaatacaaaagagagatagaaagaaaacactattaatgttaataaacgataaattttgtttgttagcttttgtccaagtgcttagacatgtttgaaataatttgattgtttttaataaattttaataaacgataaaaagtatgtttaaaacaatttactactaacaatactcctttccagatttttggtgttgtttaatatactcctctccagatgctttgcaatgattggaggtgatttcatagtagtgatcaagtgactaaagtctcaaattcaaataaacttggcagatgcttgtcttgtattgtgttttgaaatcacaatttgattgataatgtaaattataaaaaaatataaaataaattaacaacttagattgtagttataaatcactaattgtaaatatttttctgttagtagcttaattaaattcaacaaaagagattattgacatggagtgtaaatattattataactgtcactacttcgcaaacgttgcattgaacatcagttacgagaacggccaatacatccataacgcgaattttgtggtagaaaatctagattctaggagtgttataagctagtataactttaaaatacacctttttttttccacttggaaaaatattgatggactaaatttatatttttcatctttcatcaaatcaatttttactacatcatactttggaggatgaattttactatttacccaaaaataaaatgaagtctaattctataaatggttagagaatattgtaattacgactagctaagaagtatacatcataagaattaaacacataaataagtaaattttaaacttataaataatacatataaaagttatgcaatattaaaataaaaataaaaactaaaattagaacaaaatattaataaactcacttgtttttacatcctttacataacattagttaatgtaaaggatagcgtttggttgtgatgtggacaccggacaaggaggccttaaaactcaaaagactcaccgtggtatggccaacaccgacacatctaaatgatctaatcacaccttttttttcataaataaaactcaagcattaagattcataacaagagtaatacattatattcaaaattagattttgacataacaagtattgtttaattaagtttttcatatttaaaattatttaacttcattaaaagatcaccattttaattcttaaaaatataaaaataagaattaaaattataaaatattatttagtattaaaaaaaccatttaattgtctacactacataaaaacaagaattaaaaaatagatgtttaagaattttaagaactaaaataataactttaaacaaaatcggggccaacatagaagtaagatcatgaatgaagtaatcgcaacttgtttgacatgcaaacacagctattgaaagtctccaaaataataaaaacccaaacctaacatataaatatatcaggctcaagttgaggtaattgtagatcagaatctcaaacctcgtgtttaattagaccctaagttgccttgaatagcccaagtgaatcaaagaaaggtcataacaaaattattctactgttataaggaccaccgtacctctgattctattgtacccttgttacagtggtaataaagtgattaaggagatactgaaacaataacaccagcaaaatagatcactattataaatgacaaaataaaattttcatgcacatataatctcccttcctttaccattacttgctggaattgctagtaactaaagtgttggagcattcttctatagaaacactctatatattcatccatcaagaagacatcattgattttttggcactaaagaataataaaatccctacttttgtatatttggagcttccatggaagtagcggcgcgatagcgctgcaagatttgtcacccgcaacgctgccatcggccaccactggtcgctactggaaaccgtcgcattatgataaaaaaagtagcgattggatgccgcaacccgccgttgaagcgagatagggctgctattttaatctaagatttcgagtactactaaaaccaacaaacaaataaaaagtataagttgggggtgcgtccgtgtggattttacaaacacgaaacatttaccttattcacagcatattgttcatttatttatatcatactgaaattaattttaaactgttaataacaagtaactcaaatttatccaaaaaccagtgaatcttgaaccttatatttaagatgtgtgggcataaaacaacaaagttgctaaataattaaaatattagacggaagaaagagaataaacgagagaagagaggagagcatgtagcagatacgaaaggaacggtccagatgattaatccgacatccaatcccatggtgggaaacttgtccgtgcttatcgacaaacaacggccaagaaggttccacgtgtgaagcagataaaggcttattaacgaagccgatccaacggaccctgctcagtccattcttgctattttttttttcttttcacgaactctgaagtcaaccgaactcagaaaagcagagcagagtgttgaattgattggtttagttaagaagatggctgagtcggacaacgagtcgggcggggcgcagaacgcgggaaacgagggggggagcttcagcggggagttgtcgcctcgggaactggacaggttcctgccgatcgcgaacgtgagtaggatcatgaagaaggcattgccggcgaacgcaaagatctcgaaggacgcgaaggagacggtgcaggaatgcgtgtcggagttcatcagcttcataaccggcgaggcctccgacaagtgccagagggagaagcgcaagaccatcaacggcgacgaccttctctgggccatgaccaccctcggcttcgaagactacggcgaccccctcaagatatacctccagcgcttccgcgagatggaaggcgagaagagcgtcgccgcccgcgactctaaggactccgcctccgccgcctatcatcattatcagggacacgtatacggctcccctgcttaccaccatcgtcaagtgcctcctgctgcctctcctgttatgggtaagcctgggcctgggcctgggcctgggccttgtagacccagatagtcagatacataccatcgacgtgctcctctattcgccgctccttttattattttttaaaatcataataacgcatgactcactcctactctttagtgcttgcttgccactgggactcagagactaatttcgggggctgaagtgaagtgaaggaaagggaaagaaattattctatcattattattggaaaaatgctaatgagtttcgatagcgttaggatattttttaaggaattaaaagaattttttatttattaaaatgcataaaattatattatttataatttttttacaaccttaattattattattacaccaagaaataagtatggattttattactttcattggtcattgggcactttgcaaagtttaaaaagtacagtgtttcttttctttctttttgtaccatcacatgtatattatttattgttattattatttacgtccatcccatgcacattgtcaaatattcctttttctagctgaatatacatgtgattggaagtgttttctagctgaatatatgaatgatgaaacattttttattagttgtgttagaatttaagtgtgacgtcaaaatctcatattagataataatggaaaagttctttaacatacaagtgagaaaagatccacaaaattaagttttaagattttgtgttaaaggtatgaatactcacttggatataaatcagaaagttgactaatatacacgaagaaagtatataatttgttcattgcatgcatcagaaatgaagcaattgatcaaactcgtcaccttaatttgttattattaaacatttctacaagtattattaattcgaatcctgccactgaataagctgacttcaattcctcaaattactcattgataaaggtaattttttttatttatttataggaaattagcaactattgaaattgatataggcgatgacagtgtgctgccaatacacattcacatcgaagaatataagcgatgcatggtgctctctacctgaaaccatcaaatgtcctggataccaggggcggaactttgggggggggggtataagggtgggccaccccccttaaaaaaattaataaaaaaatgaaaatgaaagagaaaaaaaaaaaagagaaaagaaaaaatattaaaaaaaagtaaaaagggaaagaaaaaaatataaagaaaacgtagtaaaaaagaaaagaaaaaaaatatgaaaacaataaaaaggaaagaaaatataaaagaggaaaaaatatataaaaaaggaaagaaaatgtaataaaaataaaatggaaaagagagataatagaaaagaaaaaaaggaaagaaagatgataaaacgaaaaaaaaaaataataaaaaggaaaagaataaagaggaagagggagaaagaatactataaaagggagaggtctggacacaaaggagaaaaaggaaacacaaatcccaagagaacataaggagtcaaaaaagttatttcatttgataaaccagtggaagataagagtttcaggtatcccctcattcctttcttttttcctctttttctctttcttcttcttgttgttattcttctaaaataaaataaactactatttgcgccccttgtttttacacatgtacccctaccatgttgggctgaactcatttttgtgaaatctgaaacgaaataaaaaaaaacataaactattatttcggttgttaatgttgtgcaatgtgatcttatgaaccaatctcaacatattgagatattggttgaaaaatttacttctcaggagattgcaactaatcgtttgagactacaagtttatgtggatgtgacaagatgacttgctcttcaaggatatgcttttagaggtcatgacaaaagcttaaattcacttaaccatggtaattttcttaagatggaaatttttttagcttcctataaccaagaagttgcagcaattgttttagaaaaaactcctcaaaatgcatcatataattcccctaaaattcaaaaggaaattcttcatgttttatctgaaaaggttaagaacataatacaggaagaaatttccaatgccaagttttgtcttattgttgatgaagctagtgatgtatataaaaaagagcatatgactattgttttaagattcgtagataaaaatagataaaaatacatcatgtgattttatctgaagtgattttaatttctgtaatagttttttttatattagatttgtattgtcttcggagtacttttatttatgatataattttttttatgttcaccccctctcaataaaattcctgattccaccactgctggatacataaaaaaaacatatataccactcacaaccagtaatttgatacagagatttatctatatatgttaaatcatttcaaccttagagaaaattcaatccataatccgtgatagtttctttgaagttatctgtataaactaccatttctttattctatcttatagcaaaatgaataaataatatatgcagtatgcactgacattgtattttaacacacagaaccataaaatttattgatttttataataattattttaaaagttatatgaataatgatttttcattaattaataatgttaaaaaatttacaatttctgtacatgcatattaaaatctgacaaaagatgggggaaggactcgtgcttttacttcatctggagctttgtttttctttgggcctttaatttgtttttgtcagggctatccaatgtaagctgttgtatataggcttggttgttgatacaatccaagccagcccacaactataccatctcgcaatgaatcatgtaaaactctagttgctgatttttttactgccataataattgattttgtttagagaattgattattaaatctatatctttttttttttctcatttgtcattttataaactattattcttagattatttcaatttattaataacaacatttttaaaaaagttgtatgttcattatataatataaaaaaaagttgaaattttgagagtagttaaaataattgcatataaaaaaatatttttattcagagaatttatttattatttttaaataatcaatgatatttgaaaaatatatattcttacaagatataaaagtataaaactatttaacaaataatacatgtttattttaaagtttaggtttattgtccattttctattatttatatttaatgttattcaattattttatgtccaaaaccaattaaagtataagtaattaatgtgttaaaatcaagattgaatgttggataataattgaataaaatctttaacaaaaataattttttgatgaaactttccttacctaagaaaataagatatttttttttgttagtttttgttgaaagaagaaagagtgtaatactgtaatgttatctatcctcgtgccctttctccctcgtcatattctctccccatttggcatacagcatccaaaatcgaatcttcgtttgaaacatggcttcctcttccttcctctgccccgcagcatttaccttctcacagaagccacttcaatccacttttctgcatcccccctctcttctcactctaaacattcttccaaagaaattgagaaaaccccaccaactgagaaccctcatagtggccaaatccaatggcagtgactctgctgatgttcctgaccgtttaatttcagcactttgctacttttaccctttctttgatggcatacagtacggaaagtatgtaatcacacagttctaccctgttcaagccattgttcaaccattggttcctgcaataagagttttcaagagctttccttttaatggattccttgtgtttttgaccctttattttgttgtggtgagaaaccccaatttcagtaagtatgtgaggttcaacactatgcaagccgttgtccttgatgtgctcttgattttccctgacctccttgaaagagggtttaatcccaaggatgggttgggattggatttgataatgactttggatagcactgtgtttttgttcctcttggtgtgcttgatttatggttcttcttcttgcttgctgggtcaaatccccagattacccattgttgctgaggcagctgataggcaagttctttgaatcaccaatccgttattgagataatttaattgtatagcaaagcaacttcagcctaagtagtggaaaagtttgcattttcacttccttaatagttaactatcttggaaagtttctgcaaaacggattttagttgtttcttacattgctggattctagtatgtctttctaaatcaggattgaattattgtaagatgatgagaaacttccccttctccattgttaattgaattcaatattatatctctctggatttactgaatggttatggcttttgagttgtagtgtgccacacatacatgttaatttcttgtatgtttaacaatcctacaatcagttatcttctcttcttagttcttatgtcgttatgttttagtttgagctattcttctaagagttcagacttcagagtggtgttttgctataatggttatgcatagcggaaataggaaacacatataggggtaatttgctgaagttataatcttttcctcttttcttttgctggaagcttggaaccaaattgttattttggcctgttaatgaacgagggaaaataagtaaatattgaggcaggaagatccctatattagatcttaaagtgtttagttactttctcacatctgctcgattagtagcatgtttgattgatcaaggataatctatgtgacaattttagattttactctcccccgtgtctttctagtttcctttatatcctaaaggcttgtttgggtgagcttctttaaaagcacttctaagacaagaaaataaaaataagaaaatgagatgaacttctccataagctaaaatgtgctctcaattagctaatttgtagaagttctctcaaatagcttttctaaaggatgagaggacatctacaaattagctatgaagagttcattttagtttatggagaaactcttttcatttgttgtttcttatttttttctcctagaagtgcttttagagaagcatatccaaacaagttctaaacacatgtagagcagtcgtgatagagtgtgagcctgagttgaatgtgcaagtactaagtactcttgaaatatgtatgacagaagttggttaatagatacgacaagcttttctgagagatacaagatggcgtcaatgcttaaaggttgttggactaggataattctggagatgtttaatcaatcttcatttagcatcttgaggtgttacatggagcataaactctgatatgtggatgtaaagttccatgtctcttcccaaggttaggagggcctgaggattgacaacctatagtaaggatgactacatatccatggtaacttcagtgtaaaatcaaaggataacaggatgtcaatatgctatctgttagcttctccttgtgtccaaccaatccaattctgttctcaaatgttgcattgattagttttagaatagttttgcctttggtctcagcatccactttaaaaagcaatcgggatttcatttgttcgttgttatactcctttccttatttatcaaaatgtccctcaagtgggatctataggtatccggctacctatccaagttgatgttgataaaaaaacagcagcatcaaagctgtttccagaggttctattacttgacctcatctatagtatctgtgattagctttacaatactcatgtctgctgttcttagaaaatgcttaggtgttggacccttatcaactactctgtataagtcactcgggaacaatctaaaaaaaattgctattttgttgcggtatcatggattcaagaatcatacactgcatataacattcaaaaacaggctctctcatgtgtaatgcttttatttatttcttctcatatacttagaatgacaacttgccctgggccagatttgtatcaggggctctgaagttgccaaagaaattacctaaattttgtgatacgaggactgtaaagcaaaaccatttcatcttaaaatgcctcttcgcatttttgccttttacctattggtagacatgatcacatgcctgcttgaattactggaatgcaacattaggctgaaaccatttctagaatctggatcagtaaccgttagttagctgtttttatcattaggcagattttctccacccaaaagttttaccttgctagagcaatggattaaccgcgtttccgaatttgatatgttgttactctctgttaataatgagggagacaacggtgattgcagtgattgcaattatagcagtaaaaataatgatagttgtagtaatagtgctaataatagtgacaaatatgttactatctgttaataatgatggggacaatggtgattgcaattatagctgtaataatgatgatggtggcaaaagaacataaataatacttttttaataattaattatcaatttgagactgtttggaaagtaattacatatctggggcaattggttacgctcagaattgggcatgatcagtcacgcccagctccaggcgtgactagggggtggtcacgcccaattttgggcgcgttccacttcagggcgacacgtgtcatgcacagatggagcgatgcgtatataaacttcggacggtcataacttttgactggaatgtccgattgagacatagtttgtgtcaaaacgctcgaaattgagagtagaaaccctaagcaaattttcgaaggggttttggtcaaaaaaatttcaaaaaaatgtttctaagtacctcaaaattatgatttaatcttcgaacatctaaaaattttctttttttctattcttttaattatttggtcagttaattgcatgctattttttatttttttaattacctcttttaatttcgagagttttgacatatcgtacacctcgaccggaaatttctatcaaaagttagaccaaaaacgttattttttaatgttattttctatcaaaaaaaatgtttattaaaattattaatagcatgttcccattctttagaagcaaatttcatgtgtataattcttgtgggatttgcctagggcttctactctcaatttcgagtgttttgacacaaactacgcctcaatcggacattccagtcaaaagttatgactgttcgagtttatatacgcatcgttccatctatgcataacacgtgtcgctctaaggtggaacgcgtccaaaattgggcgtgaccacccgtctagtcacgcctggagctggacgtgactggtcatgcccaattttgggtgtgaccaactgccccatatgtgtaattacttttcaaataatccaaattgataattaattattaaaaaattattatttaggattttttgtctgatgatggtagttgtagtaatagtgttaacaatattgataattgtatgctaccactatcatatgcaaatggtagctataaagtaatggtgatgatataacaataatagtagtagtaactagtagggacagattgtaaatgtcactggtaacgaggacaaaggtaatacaatgacaacaatcagtgtgagaatagtacaaacaaaaatgttgcgtagaataagagaattttattatatgctctgtgtttccaatcagcttttccttaaaataactttaattttgaactaatgaattggagttaaattttggagaaaagctaaaagtagatgggggagagaatttgttctctccatctccctttcttaaaaatcaaaataaataacaaaaacttcataaaattgccttcccttcccccaaaacaaatactaaattagccacaaacttgctaagaaaaaagatttcttgctatcatattcataccaaaaagagggtattcataaagggaatttaactatatataacaatggatattgaacttggagaggatatggtatataccacatggagctacacaagatgaatatattacaaaagcatttataactattgagtattgacaacaggatattatacgacgataaacaacaaaaagaaggcaaattcagactagaaaaataaaggaggaaaaaagcatgatgaggggggctataattggcagaaccatagaagcagggccttgaccttccccataaggcacataggtgtaaggatttggaggtccataaccataaccataagtgtaaggtgcaggaggggtacaacactgaacacctgcagcaggaggacacttagattggcctgacttgtgtggtgatggtggtggtggagcaccatatatagagtagccagaagatggaggagctggctgtgacggtggtggtggagcttcataagaaggataaccagaaggtggtggagtaacctgacaattctcacaagaagttggggttgggatcacatcacctactgcatccccataagcttcaaaattaaaattggactgtgataaccagagagttacaactacaactgccacaaactttgctccaaacatttctttttctctcaactttaatgttttacttacttcagactagaaaattcatttataagaaggaaaggagtgtggagctgggagataatgggaattgcaatgatgacctcataaatgttggatatcgagccatcacacaataatcgaaaaaagataaaaagataaaagaaaagaaaaaaataacacacagaatttatctaattcacccaatgtagactacatccaattattcattaaattttgttacacacttatacaattatactcaaattataataaaatatatagacttaaaaatattaaatataataattattcatggacctaattctaaactacaaataaataaaatacaaatctaacaaacaatattagaccttgaaaaaagttctgagacgttgtctcctgtccctgttgggaagacatatcttctaaaattacagtatgaatcatacccgaaaaaaaaactttagaaggaaaagagtgttctagatttggatgttttcatttgcaaccagcacctgtttttaatgcagtcttggatcattcgcctccttttcttctacactagggagatggtgccgcatggcagcacatctgtcatgatattattgaagtaacacacaaatgtcttcctctttgcatgagtctctgtgctaacggattgttaaaattttcaacctttccttttcacttctactttctctttctttaattaaaggtgttttttttttcttcttagaacttatctttttcatcattgataaatgttgcactatcgctgataatggagttcagtacaatgatgacactaaaagctgaacaagttctttcaagtaaatgcttcttttaactagagatttttctttattgaacaatgacgatttggggggcaaaaaattactatattttttctgccatcttcaaaaaatcactatggttcgtttgtaaaaaaaggaaattgaaagatgaaaaaaaattaaaatgaagacaaaattttcgggagaaaacattgattatttttttttatccaaataaacaaaatatcccccccccaaccagtcataagattattttctgtgtaggaattgttaaaatttcgacacgacaaagccgtaactatgtaagtcttgcacaacatctaattaatcaaaatgtaaaatctgtggtgttaaaagaaatacatggcaaaaacagagaaattatggtttattagacgcaatgctaaagttgcacccgatcaaataaaatgaagcctagctagtgtgatcaattggtcataatcaccgtgtctgtgcctaaacatgaaaaatccaggaaacaagaacgtgcagctaattaacatctgaaatgtgagaaacagatatcattcaacttttgtctaagacccaaagcgttgactgaattggaagacttgtccaagtcatggctatttaaatatagataactcaattgctcctttaaatatgatgagataggtcgtggagaaaatccagcatagcaccttaatttctaactttgctaagcataattcattttcatacttgaagagctcgtgcatctctgtaataggatgggcagcatattcctcaaacggcatccactttgtgacaaaaggaagaaatacatgaaaattgaagtcaaaagaattgaataatatacagataaaaaagttaagttatttatataacaagtttacataacatttatttcttttctctctatcactttaaccaccttatctctcattattgtatagtttttttcttaaaaaaaaaaaaaaaaacgtagaaatagaaattacaagatgattaccaacaatagcactacattagtacggaaaacatcacttagatatggcagtgtaaagttaattagtcagcatatatgatttaagttctttagagaaaagggtattaccgtattaactatagttagaaaaaagataaatgaacacttcaaatgttattaaacacttagtaggtgagagaaaaatgaaaaaatataaatattatagagtttatgatatgataaaaaagaaaaataaaatgtgtcgataggatgtttgaaagaatgttcgtatctaatttaatatggttggagaggctcaaaaaattgtaaccttaaacatgtagaaaaattgccaacaaatagaaccctctatcgtatgtgcatgtattaataattcaagaatccacatcattcttatgagttgcatggtcattttccaactatgcaagggacgtgatcgatccgaacctacgcacgagataattatatgatgctttatgggctaaaaatgtggggacaaaataatcacatgtggatagtggtcatataatccttataaaaattttggtcgcaattaaaatgtctagtaatgcttaatccaaccaaacacagtttggcgtgtaatcatatatattcagcagagtaatccaactttctatcatattatgtcacacaaacttcacgttcacgcaccagaatgaaagtcattttttgtttgccattgaactttaatttgttgtagagagcatgcgcattaaaatgttaggtgtaaatatatatatatatatatatatatatatatatatatatatatatgcgtcgcttggctcatctgttagacaattaatactagctagtcctaaagaaggatgcttcatttatgtgtcttgtcatatatatgtcacttcttatgtgatccggtcttatccttgcaaaatatctatcatttgttgggtgatgagaacaaaaactactttgtcacttgatatataaaaattaatgataaactttgttaaatgtagacatgcaaaacatgactcgatcagatatggcaatatagtgtgtaaagttaatcagttagctcattgatcatttgtgacatctttacatccaaaccaaataaaagaaagactgtataccttggcagcatcaatttccaaatcttgctttttgatgtcagtagaaagagtacgcaacatgcaaaggaaaaacagttctgatttcccaaatagtgaattatgtgcgtgcctacaaatcataaacatgaggagcagcttaaaacaaaattaaaataagagggaaagaagaaaggcagattttatgagaagtaaatctcaatcatcagtgaaggcaaagacaatttatatatttacattctctaatgctaaaatcatgatgaagaaaaaagggtaggagacagacatttagttcagtttctaaagtaagtttgaggaagaaaattgagacctgaatgccagtaactccacaaattctgtatcaatctgaacaaggaaagtaaatagcaaagttgagttatattaatacaacataagaaagggcgcgcatttaattaacaacaaatataaaatgcaacatagcaacattttacatatcgacacttactcccgtctcttcttttacttctctaacagctgcggctaaaagctcctcaccctgaagttaccatgttaatttcatgtttctacacaaattgaaatatttatttttcaacacgtggggaggaatttttggttgaaaatgttcataccgcttcaactattccagtaggtatcttccacaggccagtttttcatggaatgtacctcttttttttcctggactacaagcacctatatataagcccaccataagaaagaaagaaaagaaaagaaaataattaagagaggaaaagtaattaaagttgtaaaatgaaacctactagttgaaagcaaacaaggaatcaattataaggaggcaaccatatattatatattgttgttatattttgaacgaacctctttgttatcatttaagacaagaccaccgatccttacacgcacggtgggatgcattgggagggattgtgcagcttgtttcaggaataatccaataaactagcattagatagtttggttcagcatggtggtaccggaaaccctcctgcatcatgccaccaacatatatattcattgaaaaatttatatatctgacaaaaatgagataacatttttattgaaaatagtttctctagctcgatcccatccattcgatcatttccattgtgatttcacgataaaattgtcttctgatactgatagtattcatgatgaactgaatcagtttaatataaattacaaaaattaaattaaataattgaaaaaactgaataatattattaaattaaatttccaataatttcctatttaatagtgaaaactaacatgatcaagtttaaattaaactcatatatatatatatatattgaaaaaaaatcaaatctcatatcgactaagataaaattaaaatagagtatataagggagaataatcctaattttttaagctagtttttgggattgagttagactcaaactcatattttaagaatttaatcttattgaactagcttttggggttgagttagatccaaattcacattctaaaaatatactttttttttttaagaaaagaaattagaatctgacaaacatttccatctggatttgaaaattagataatttaattaaaacaatcttatgtagctgaatagatataccttatccttgtacaaggttaaagtaattaaaatctgacacaaacaggaaacattaccttaactgcagtttcaacaagattaactaatgctgtaggtaacttgatccaaacaccgcattttgcctgcaacgtatattataattgataagatagtaggattaatgttatggtttctttacaaatcatttggatagtatacttttttcaaattcataaatgttgatactatcttgaattaaaagttgttcacattttccggctgaactagtctttcttagtaagctgattatagtatgcagatattacatgatctgtttttcaaaatcgaagaaaaataaaatgatgagattgaaaagcctaatattgattatataacatcttgtttctgattgcaaatatatggagcatctaaaaaatgataaaataattcatggtttcacacgtggtttcctcattcactcgtctctcccattatctctagcctcgattactacctatgatgttctctctctctctctctctctctctctctctctctctatatctatatatatatatatatataaaacaaaagataatatttttttatcttaattataacagatataaagactactttaatttattgttaaatttattttttatttttaatgattactttcttttttccataaaagtgtgtatttaattgagttatatcaacaaaataagacacatttattgattgaaatttttttattttaaaataatcatattttaaattatttaatgttataaataattttgaaataaaattaaaatttatgacaaaacaattaatctaactatttttatttgtcatgatgaattaagtaattattatttttatataaaatcagggttagtataaaatttgctgagtgacgtgattctgaagcaatcggtgctggaggctaaggttttcacgggaagcgaaaacatgcactcaagcctatcgcaggatctgtagatgacttatccaaacaaagggttgaaagaaattaaggatcagtgaagcttaagaattttataaacaacgaaaaattgtacacttacaagacgagtaattacacttaattttcacgtgaattaatatcttattttatgaaccataatcttaatgaagttgaataccttaatcttaatgaagtatgcattgatatcgttacctgtttcttccattttgaaagtgatgttctaagcagagtaacgaaaatttcagagtccattggcttctccaaatctacaatgactcctccatgggcatcatttgtggcagggagaatctcaaaatcaccctcacacaatcggtcccctgaacttggtaagattgacattggctcaactgaatgttaagcttcacaagaagatttaactatagaattatagctagggattcaaaaggctaaagtttcaaagcataggatagggggtagaactaatcaatggaagttgggaagtggtggtacaaggttgcaatttataatgcaaaaaaatgatattgggcaaacatcaaattctaactgatagctaaaaaataaaatgaaattatataaacataggttaaaagagttaactcacttggttgactaaaatgcataaattattataaattttatgtttttaattcgtatggataaaaaaaaaattatataaatatgtataataagtgatatgatgctaaagagaaataaaagagaaaaatgaatattaattaaatctttgaaatcataaagtgttaatatgtcattattcattataactatctgaccacaagcatataggccatggaatgcgcagctctcgtgtgagttctcaacggacatgccataaattgtcatgtgtttctagaaaaagtttactttaagtgatcattaattaattcatccgtactgtacgatcaaatttatatcacctcaattatactattatagtgagtatagtttgtaaaattaatatgtctccctatttaatactttataattgatagtacaattggaatacacggggattcttaggtaggatatgattgcgcatatattgttgaatgctgggtggggatgtagtcaacagtatgaacaagattttgatttttcctttttcgaaaggcagaaagttgattgtcaaattaaatttaaaccttaggtctatagtgcaataatacgtgcctcacaactcgcaagtttcgacttgacttaaggggtgtttcacgttcagagtttgaagtatgaagggttgttaatttcatgtagatcgatcgagtatcatattcgtatatgtaatttgtaagctttaaaactatatatatcactgtatatctttggcaacgctatacccccaagttaatattaaggatagatttttaattattcatatttgaattataaatgcctttcaataagcataaggggttggtgtaactaataacaagtcatacttttagaggaaaaagtgcctatcgaaatgcttttaaagacttaaaaaaaaaaaatactttgcagacttcagtgcactgtgcacaagagagatttaatcatttcaaggttggataaaaagagttttcaagattgtttataaagaaatctatcatctgaaattcagaattataaatatatatggcaactagcgagagatgaataacgtcctcaaattaaaaaagaaaaaaagaaaaaagaataatatttcttagacaatgcggagtactaactcattgggctcaccaggcccaaccataaaaaagtattgagccgaaatatgagctggcctgttttcactccacatacatgactaagactttcttattataatattattatcacaaattgtattagtcatgtacgatcaaattactttctgaatttttatcgttacacataattaaatatagtttttattttcttgtacaaattctttttaaatttgaaattaatacactaacactttgttttatgtttaaaaacatatttcactgagatactcttaaatttttacactaatactccctataaaagagtgatgaaggtgatgatattgataaggagtcccacatcgtgcggggtccctttctgccgcaagaaaattcttttgttggtgttttcccagtgatccctccaatagttcgaaacccaacaatgtgaacaatgatgggtgggttttatggtgatgtgtcaagtggtggtggtggttctagtagcggtgccaatgtttgctatgatcatcatgttgcttactttaatcgtgacaactcctttgggaaccggtgagatctatttggcagaagtacaacaacgatccaagaaatgcatttagtgtggttcaatatataggaggtgtgctacaacgtgctcttttatacattttgtttttagcttttctgttattgttttaaaaaaaacgtgtgttgttttgtcatatttaaagttgtcttaaaatgtatggaacaattaatatattaagtatggggtctctttttcgtgcccctatatcaagttgactgaatgtaaactatagtgtgctcagtaattgattatataatattattaagctagagtttaatttggaggtactttcagtttaatttttttaaattaacatcaaatctgtgttgacacttcattatttaataaattttactaccttaaaaccaacaatgacactagactaaattttactaccttataacatcaccacgggataaaagctagtttaagcctatactaacaaattttctattgagaacaaccaactacttgaataaatttcaataaatcagggcttcaatcaagaatatccctggctcaatttttatttttttagaacaaacatattgcagagatccccatcaaccgttaacaaataaacttaatatactacatctaactcaaagtcttaaaggcattaggtataagtgttcttcgcactttaagtattgctcaatttatcaattcctatatatattgcaagactttttcactcacttgttatccaaaaaagttaaaatgagcaacttcaacagtagtatttgcaattcgattacataaattatgtgatatttatttatcagcaaatttacaacacaaaaatgaaaaatcatctgtttatagaaaattggctcagatagcgatgcgcagtggctcttgcaaagacccatgtctacagaatgtaatgcaaaacagtagtaatcatttatcatttaagttcaaatataattgttgctctctgatataatcaatcacttcatccgcagtaaggtattttatagatagtcctcttgcaatgcaatccctgaaattagtgaaaaagacaagaaaattgaacgtctctcttttttaaaaattatcgtcctgtaactcttgaaagtaaacaatgtcatagcattaccttactctggttgagctgatttgatttggaacaagttcgttcacaactttgatattatcctaaaaaaatagaggagaatttaaatatgcataaaagctgagtagcaaagcaattcattctaattcttattcttgttcattacataacaaaacgctgatacaaagtctggtcccaggaattttgtttcataactgaatatttgaaaatatatatatatatatatatatatatatcttatagtttatatagtactagtgtccttgaagtatccatccatactttgaaggtatcatggttcaagtatccaagtcatacaggaaggtccagtatacttaataagtagtatccgacacatgtcaaacaaaatgtcaagaaggtgggtgttactgcagcacatgtctcacactccgacacctcaagaaagtgtccaaggttaaaagctaatcggtaatcaaggttgagaggaattaatcaattctaaccaatcacagcaacaaaaaacgatgtgcactagcacacacatgtacaaacaaaaagataataaattttaatcattaaatttaaaattcccgtgttgatcgaacatcaacacacctaagtatatgggacatcacagaaggatttcataagttggtctataatttgaccttaattcggtaaaatacaaatacacagttaacagatatttgaaaatgtccataagccacatttcattttaaacgcatatggggaaataggacaagcttgaaatgtgagataccttattctcattcagaatttcatctttagatatagtcttctcaacatcttgtccttccctgcgaatgcagactactccataatctttgcatatagttttaacctagagtacaaaaacaaaattatagttcattgtttccacaacctatgacaaattagtattcattaacatatttggcaattcaatcgttttatccactaaccgtccaatccatcaagtataaatcaaccaatcaatctattcaattataaaaataaaacttaatacattagttgaattggattaccaatttgttattggatagataatgaaccatccaacatattttgcaatccagtgaatcaagtagttccaagttcattacttggacataggtctttatgagacaaatattggattctatggtatttgggtgtaagaatgtgtaaaatattaaactttgttttagaaaaatattgttttgaaaaaaataaaatataatggatggacctttttttaatgaaataagttatggatgaattagatttttgtaatacataattaatggaccataaatggattcaattcaaaaaaattatccaattcattagtttgacactcctaatctatactccacccatgccttgtatctatgtggtaagaaataagaataattgactcaataagcttgttaattctaacaataaaaacacaaaatcaatataattcctctgactttgaattccatgaccatttaaggttggtttaccaaaattattaggtgggacaaggtattttgttccaagaatcattaaataactccgtgtgaaactaatctatgataaataatattagatttttccgttatagtacctggtcaggaatccagaatccaggaatgctaaaagaatgaaggagatcagaaccacagagaagaatgaccttgagggattctacactaatcaatacaaaagaaaattattgcattgttacaacattgtcaaaaacatgcatagaaagaaatgaaaatctagcacaaaaatttttaattaatgaagggaaggaactattaatgctccttttagactaaatcacatttaagtcaatgaacatatatatatatatatatatatatataacttttgaagtgcatccatatagcaccatatggaaccaaattgcccgtccaatcatgcatccatatagcactaagaaattcccacaaaatactagagtcaaatgaccacctaatgccagagacaggaaaacatgtccaaacattaaaatccatatattaatcatttaaatcacaaagtattcctaacacttagcaccacattttttaaaaaagttcagcagcagtacggattagcattaatgtgactagtatttcattcttaaaagagattaagacagctggtgtcagtgtcacttcctttattttgaattttaagatggggcaggggagcaatttgaaatggcaattagagtaatgtgatttcattgaaggcttgtttgttgagcatacctctagataccaaccctgtctcacaaactgaattctggactctggagagaacagttaaagtgcgttgatatgtgctctgacttgcctgcaacagtttatagccggataaaaatgcaaaatattaataaatcaggttagctagagagccaaatatttctcacaacacgcatgacatcaaagcactgtctctcaaattcaaatctatggataatgaaacttattaacatgcacagaaaataggaagacatgcaatctggctgatagaaagagtaattacctcccatggatcaaccattataaaatctgaacttttgcaggctaaatgacataattgtattcgatgttcagcagatattaggccctatataaacatgcaagcaaaatacaattagaccaacatgtggcagtgaaactaatagcatcacttgattaataaaaatcataatttcattaatagaatcataggatttgatctatttgctgaaaaaagtaaaataaaaactcagtcaagtgtttcagtgttttccacatgccaagcatatgttttaccttatttattcatttattttgctaacaagttttacagactcgcatgtatggatataataaatgaagaatctttttctctctttgcttgacaacttcatacctttttcttgtatgcatcattcacaggagacaagtaacctccaattacgcagtagccatctgaattcaacgcatctcttgcaagctctaaggataacacccacaaattttattttaaaaataaaataaaaatcagactagcagaaaataaatgaaattaaaaattaaattgcacgtaattcaagaaattaagttaatgaaattccatcaagaagtatgtgaattagagggaatattcaacatatactcccattcaccttcattaagaaagtagaaactcagagatcatgactcaaggaagctaacaatacaagaagatacactggtatgaattgttcccaggcaaacccaactgttttgaacatctatgtagtaagtacagcatagaattttcaataacaaattcaattatatgtatatggattttataattataatattaattcaagtagacaaagaagactatattattatataatttatagtgagtatattttaacaatggttaacatatggtttgatcacaaaatgcaaaaaaccactgtaaatggtaaagtgattatcatgcatgcagtgttggctactacactattgagcaaccattgacttttatttttttttcacatgatgtatatgagatcttaattttttccccttaattcttctacactgaatagaaaaatagaaaagtgtcaaattgttcaataatcaataccttaaagaatgaacttatattcaagatgtcatttattttgttagaggagtggaaggagttaaaattattcagatttgagttttataagcaccaaagaagtatagatgtctcagggcagtagaataacaagtctctgcactgtaaacttaaggaaacgcaactgaccaaacatgcgtaaatgcatgaaagtaggtggattaaagcttccagttgccaccagaattacatatatcttgctgctgttttaatgagagacagaaaaagaatgtcataattaattcataacaaggtcaaaagaaaagtccctcacaaaataaataaataaataaataatacagacaggaacatacttgctagtgtttgcaggggagggttcattattaatcaaatctaaagccaatttatccagtggcagtggaacatccatgacctgaaaccattaaaaacaagcaatgctgaaatccaaatgcaaaataacttatttttttttccttgatggattaattgaacttggaattccagttacaagctccaaataagttaagcacgaagacatggagtttcaagctcaaattacaaacatgaatcccaaccatgtcttcctttctaataaattccaaattagtacctattatttgccaacaaaaagcataaacaggtttcagacaaatttttaatttctgctgtgattctaaaaagacattgtagtgaattaaattacagagagagaaccttacctgggtgtgttgggtgacggattgagggtgctccacgaagcagaagcagaagccgaggatgggcagtgccaaataagacgatgaatgaaatgaaaagaatactatacatacaaatatatagttatatacacttgatgagaaccagtgcgttgaacacgaagacgtcaaattccaatactccatgccattgcccataccatacttcacgcaacattgacagggtccattcaaaaaggtggcccaacaatactaggaactttaggctcttgctatttacactcattttatccaagtacacccctgtacccctcctctcaattattcattataccctttttcttaaagatgtacatcccttttacttttcagaattacatatatttatttcagaaatatatttttggaactctaatccatagtttgggagatatacttccaaaatatatatatatttttaataaaatatcatttaagaattaaaatggtaaacaagaaatgaaataaaagatgataaacatttatctaatagctgtttgttaatcttattttcatcatatcattaaaatcttattttcatcttatttttatgattctttaaaccctaattttaaaactattttcactatatattcattatataatattgcattttcatcattattatataatatattctttttcttcatgtgacattatattttaaagtatatttatcactaatttcatatattatacaccttaattacaatttacaaagtaaaatttttgacaatagtttctctcatttaagtgttgattattttttaattcaagtctacctcattcattcatattacaatgactactttggttgatgtatgatttgttattatggaaaatgtctttatgaataatgtatatcgttcactgaagagttgataatagcgtataccttaatattataaagtcaattttttttaggataaaaaactaagttgataatgcacatagacatagtgctaaaaaaatgcaaaataaagatacctagcctccacatgcagtacacacaacatccacttctcttctccattcattttcttgttgattcttggagccacgtacttcatggccatggatttcactttcttcttcttcatcttgacgttgttattgttgttctcgtgggaggtggcagtagcagacaacgtgagcttcgactttccttctttcactctcaacaacatcaccctcctcggcgattcctctctcagaaacaacggcgccgtaagactcaccaacgccgcccccacctccagcaccggcgccgtcgtctacagccaacctatctccctcttccacgcctccttctccaccaccttctccttctccatcaacaacctcaaccccacctcctccggcgacggcctcgccttcttcctctcccccaacaccaccctctccggccctctcggcctcccaacccccgccagcttcgtcgccgtcgaattcgacacgcgcctcgacgcgcgctttgacgacccgaacgagaaccacgtgggcttcgacgtggactccttgaagtccctcgtaaccggagaccccatctttgagggcatcgacctcaagagcggcaacaccatcgctgcatggatagactacaacacccaatacacattactgaacgttttcttgagctattcacgttcttcaaaacccctcctacccctcctctctgtcaagttcgatctttctcattacctcagagaccccgtctatgttggcttctccgcttccactcagggaagcaccgagcttcaccatatcaaaaattggacctttcacacagaaacaatcatcaccacgttgcaccaccctcataatgtttccgtggtgggaatttcacgttctggtgccacgaagaagcgtgacaagagggttgttggcattgttgcgggttctgtttctttctttgtggctttcacaatattcttggggttcgtttttgttcggagatggaagaatggtgggagaaaagatagagagaaagacaagtttcagaagagtggtttcgtggcttatcctagggagtttcattacaaagagttgaagtctgctacaagagagtttcatcctagtaggattgttgggcatggatctttcggaacagtgtttaaggctttctttatatcttctggaaccatcgctgctgtgaaaaggtcaagacattctcacgaagggaagactgagtttctggctgaactcaacaccattgctggtttgaggcacaagaatttggttcaacttcaaggttggtgcgttgagaagggggagttgctgcttgtgtatgacttcatgcccaatggaagcttggacaagatgctttacaaggaacctgaaagggggaagcttttgagttggtctcacaggcaaaacattgcactagggttggcttctgtgctggtttaccttcaccaagagtgtgagcagagagtgattcatagggatattaaggctgggaacatattgctggatggaaacttcaaccctagattaggggattttggattggcaaagcttatggatcatgataagagccctgtgtccactttaactgctggaacaatggggtaccttgcacctgagtatcttcagtatggaaaagccactgataagactgacgttttcagctatggggtggttgtgcttgaggtggcttgtgggaggaggccaattgaaagagaagggtctaagatgttgaatctgattgattgggtttgggggcttcactctgaaggaaaagtgattgaggcagctgataaaaggttgaatggggagtttgaggaggaagagatgaggaaattgttgcttttgggtttgagttgtgctaatcctgatagtgctgagagaccttccatgaggagagtgctgcaaattctaaacaatgaggctgcaccacttgttgtgccaaaagtgaagccaacactcaccttctcttctgacctacctctgcctctcactattgaggacattgtttcagaggctgatcaagactctatgtgcgagatcaaaattgactgatcaactcaacttattcttttcattctttaattgtttccggtgatcatttctaatgctatactctgctattctgtagtctcaaaaactaacgagtcatatcctacatagtgatagttcattcacagagctaatacactgaatttcatgtggctaataagctatgtatgttcaaagcgcaacagacgaagcttattttgttgttttgttttggtcatagttctaataagtaaaaccgtgttttaggtgctctcattctcatggtgtttgtacagaatgaggaaagtagaaaattgacatagatgtttgtatattactactactaccaagtaggattaggctgatcgggttttgtacaaaggcttatgacttcagcaataattagcaatcatgctgtaatgtttcatttcagaatttttaatcagagcccctattaataatacgggccttggtctcattctgtgtcaaacttaatggtataatttgccagacaacttaattttcaatacaaataatatggaattgttttcttcactgaaacaaaagtaaatcgcaatagatactcacggagaagtaggggaaagaggcaaagagcatgttaaagccttgcataccattgtaaaagttacactttcaaaaacattacatgtacatcatcccaataaaggattgatgtaaacgttacaaaagaggggagtttgtacaatctcaccaaaacctgaagtagggagtttaactgtaatctactctatttttatttaattactcatttattccatatatttgcacaatctttatattttaatcattgcacgtatactttttaacttatttcctacatatacatttttagtccgttttagtctcggatgacaagtactaaaagaaaaatgttatgttgtgaaggtagctagagcataattaatcttaatcatgctataaggaggagcacacatcgatcttagcaaagaaatgaagccaatctctgcgttgttcgcaatcttgtctcttctcctggtaagcttttctgaagcaactcataaatttgaaacattgagtttgtcatgagatgcatggtttatgacttttcaatgttatctctactaataggttgccaacatcaacttaagccatgcaagaaaagacctgggggattattggaagaaaatgatgaatgaccaacctatgcctgaagcaattaaagaccttgttcaagttcaacaagtatcagatgcaagaacggatcattttataagggacttcaatataaagcctaatgtcattatatcacacccatgttaacgttgtgccaagaagcagaagcaaaaggcttttgaccgcaagtttataccagtctcaaggaacggaaagtcatggtaattgaacaaaccatcaaaaagggttgaaggctaaagatgttagaattagtaataacaagaaaataaaactatgtattttttaaaaggagaaagtaaaataaaaactatgtattaagcaattaagattgtacccagcaaaaaaaaaacaaagcaattaagggtgctactttgaatttctccccatggaatgaatctctttattaactccttgagtttctttaaaaagcttcactattttttttatatacatttctctttctcacctctaaaagaaattgatttagtaggtggcagactgacgttacaataatttttttgtcagtttatacatatgaatataatttgaattgctactgttcttcgctgtcacaattacaagtttcgatgtacctctgtagaaacgctcaattgtatccgttgtccttctcgcattttgcttggctattttgtgcaaacatacttccatagttacaaaattaattcaaatgttgatttttctaatgagttttcaactttaggttatgtttaacaaaattcaaaattagctgaaaattaactgtaatcacaaactgaaaaattaggttactaaattttaaatattcgataaaattaactaatgaattagttgaaaagtgtcaaataataaaaaacaataaaattataatttatttaaaaattataattaagaaattagataaatatgttaaaaataaaaatataaaaaattataagctagatcttttaaaaatattacttaaaatgattttaaaaaaatattagaaactacttataaaatataaaaatttgtttatcaaaaaatcaaacaaatttttcaactaataaaaaaaattacaaactaacttaaatattttgttaaatattcaaatataattttaatctatatctatataaaaattatactattgtcatcatatgtcataagttgacagttttacctttttttttttcattttttaacattttgctttttctcttttcttttcttctttttccccttttctgtcacgtaaaacaccggatccacactcctagtaataagttaaaactctcccaacaagaaccatcgtcaccgctgtggacctggcaatgccatgcagttttggcgtttcagtttgatttttgctctgtaggcttcatttgttctaactttgtgacttgtgaggaaagcaaatttcccttgacacgttgtagacatgccgtaacaatcgatatcttactcatttcggttattgtccaatatgcatgccaatgcgtttatataatttggaacaaccaaatgtaaatgctgtcacatcctattagctcatgtacaacttaatcttctaactcacgttctatttgcacctgtgtatatcttaatctttcatatccaaaatatataatagtgaatattttttttttaacacaaacaatttatttcaaactttaaaattaattaagatttaaaaccttgaatcatttaatcaagagacaaaagccactgtctgctttagttttatatccatgtatgtaactatgtactggttttcctacccattatggtggtgcataagcgtgctcattaaaagcgtgttatatacaaaactagaaatttgacaagaagtaacaccaccaaaacaaaaagaaatgaaaagatcgaaagtaagaggtcattttctgagctgagctagctgaaatatgaaatatcagcatgccattaaattcccgcagaccaactaaatataaaaaggttccaataaaataatattttgacaaatattcgccttaattaattgtagaatccaaattggctcttgtgtcccaaaaagaaaatggctcctttgttggttgatgatttggattctcacattttcatcatgccaccgcgcgtatatattcacaaatcatcacaatcatttctctcagacgattcgcaacaaattatcagtgtattgacaaaggaaaatgagtaagtaaacaattttttattactgaatgtgttcctaatttttccccattacaaaaattgttcttggaaataactaggaaaggaaaggggaagccgctgaggcattatttatttctatcttgaactctgcattttgtattgagaaatgttctttggtcaccattttctcccaaattttaacagcagaaaactacaattcatggaatacgtatatagtagtatagtttaaaatcaattatcagttatgacttttatgtaggacagttctatatgttatgaaaattgagtttaatatatatatatatatatataatattaatgtaattttttttttacattattactatatcaaccaatacaaatatgagattaagggtgatgtatgaatagtgtaaattaattttatatctaataaaaaattattttttatatgaattttaatatatttattataaaagtcaacataattatcatatatgataatttatgattatataattaatgtaaaattattttacagttgtgagtgagaatatgacttgacctgacttacttaataattaataaaaatgttagacttgtacttttaaaaagacctatttacttaaataggctaaagttaggcttgtaaaaaaaaattattaggccttgtctatttatctataatatatatatatatataatactaataataacattattaattaaataaatcaataaaaccaaaggtcatattatttaatatatcaaaataaataataattaggctatgactgacaatataatctgtaagttactaatagtttcacggctttgttgaatcatatggcttttatcgttctacattagtttcccatgtttttagattagctttttttctttatcatatgtcttttaagttagccttttatgttagtactttttctattgtatgttacattcgttttctttttttgtctgttttaaaaactaagttttaatagcaattatatgtttaactcgacatatttaaatataggtttgttagcttatttaaaatttatcttgttagtatacttttaaatagactaataagatagattaaacttttaaaaaggtcagacttaattatttatataaaatctagtataacctattttatttttatccctattagtagattaccattgaactctaagaatattcttgatattatttttactataattatggtaaaattcaacgaatataaaatagagtttcttatccacttttatttcccttttctttaatttgaattctgatttattttattttttgaagaaaaacatcatgcatgtattacagtgatgtcaaggaacattacaatttatccattctcatgtccatcgtatttgacataccatttcaatatttttgaaaacgacattatttataaccaatccaacctgaggcaaagaaaagcttcacataccttaaatggtataaggcagtacgctgcatgtacacgtctagtttggctagaaagcaaaggcatgtgaatgtgatgatgacagaggaagagagagcacactcccaacaaaggcaaagactcctttagcaattcccgggttgtgctctctctcttctgtcaacatgagatatctcacatcactcatcacagtccattcctaaccaccaatagaacccttcaagacatgcatttccactcgtgatcaagatcaccctgtccattatgaacaataacaccatcatgcatgcatttgaatcagaccatacatatataataattatatggcatgtggacctttcgtgtatcaaaacaagcatatttctattcctttccttttccctactctattcttggtctaaatatgtatattatatttataattaattaaattacatcaagtaagttttattacaaatcttaagtatcctctaactgaaaatccaagactaatattttgaagtattaaaatttatttaagatattaacttatatatatgtgtacatatatatatatatatatatatatatattgatattgaattcatgtgtatacgtacatacgaaagagacatgtttttctaccaatcatatgttaattatgtagtttatatctaaacaaaattaattttacttaaatcttcgtcttcttttatatatctctacaacttttagttaagatgtgaaactaattccttttaacacataattagtcaagtttgaaataatactaaaactgagaaaatggccctagccctaatcctgggaaataatagccctaaaactgagaaaataatactaaataacttcaagaatatgtagatcacaatcaagtggcagtgagtttttcagaaaattacttgatctctaaaatttaattcatgttttacttttatatatgctgtcatctatatattaaatccttcaaaatatcaatcgattttagatcttaggtcttatatttgcaaaaggatatattaggaggggggacatgtagctaggcttctcttaatgtaagaaatagatatctatgatgctgattagaaatatattattgaatgagctagtgtacttgtatatatactatattctttagaaatgagatggggtgtggggggtgatgtgcacaaagattattagtacatgatgctgtatatctcatcaacgggagttaacaattaagcatgaataattcacctccatatatactgatccttgtctttcttcttcccaaatcagcctcaccaattaaagcttctctccttctgtacacctatgcatgatccttgatatatataggaattaaagaacaaattaataatatggaagatctaattgagggaccgtaagaatataaagggccaacagaggaaagaaagggatcgatatgagaatgcaaaagcatttgaatcgaagattaatggagttatggagagggaagatgaagacattttttgccacctgaacaagatgaaggctctagaatgaggagagaaaaacgtatcaaataaaaactctatgaaagctgaatatgtcacaccatggaagatagcagttcttatataacatcaagctcattgaatttaaccgatcgtacggtataatataatatatatatatatatatatatatatatatataattacttagttaatgatatgctaagtacacatctctacatttgttagactaatctctgaacaggctagctaaaccacataggcatatatattagctagctgctcagggattagtctaataaatgtagaattgtgtattcaagcatatcattagctaagtaattaattaagaatgatggctagttgatcaggttcaattttctttaaaaaaataataataattgcatgaagataacccttttgtgtatcatgttaatcttaatttttttcagttttattaaataattcttttagatcgaaatcatgcacaatttattttattaatcaggcacaaatttgaataatctattttttcttcctttcatatataaaataaccgacaaccatatttctttaaaagaaaatgtgatttatatatcaaaatagtctaaaaaatcgataaaaataacatgttcaattaaaattatcttaacaagtaggcaaattataaatagttatattttgacactaaataactaaaagatcaaacattttattttatcttatcatcttatatcttattatatattatcatatcttgaacatctataacaaatctcaatcatatcttgattatatctcatcatactttatccctaggattaaggaataagatatgataagacataatttcaagaattttgacctaaaatataacaaaacagttccaaactcaagtaaaaactaaagtatgaagcacaataattaagccaactcattagaatttagaatatgctttaaaagattaactgacttcaattttgataccataagttattaccattttgttgttagtttggtgagtaagatacatcatcatagtgtgatataactgacaaataactttatcatttaaatgtgataattacttaaaatatgcatgtgtataaaaaaaaaatatttgttaagaaaatttaattaatctcttaatatctatgacaaggagttaatctttgtaactcttggctcagagataacatagggccaagattcaccctaaaaattaagttaaagatacacacgtaattagtaagtgcgtggaaattgcactttatataagttacgtacatgctttaagtataaaaaaaaaaaaaaaaaaaaaaaaaaaaaaaaaaagcaagaagttatgtacagctttgtaggatacagttttcatgatcagcatacgtaaatttcagtttctcatatattttcttaagaataaattagtacatatagtaaattttacgctggcatgtgtcatctgaaccccaggaggacccactaaaataattactcagcagataacaagaaattaccatggtaaatcgattgaacacatgaaagccgaaaggtttaatttgagacagtgaagttttgtgccaaaatatcagagacctggagaaggtttgtagtgttcgaccagaaatgtgtcgtgttgcgtttgagccgcgaattattttagttaaattggctagagccaaggaactacttcgttgaataagatcttaggtagcattctgcacgcaaataaaatgagtttaattttcatgcaataaccctctttagatttttatataggtaactaattaaaaataatttcatgtatatacttacaatatataataatatgtaataaataatgttatataaaaatttgcattgtcagaacattctaataaattcataaaatttaataattcaaatgattgatataataatgtaagacttagttgcgtttatatgtatgagaaaaatttatttaataagagaattcatgttcagtttacaccttatcaaaattttttggattaagtcataatcatgtatcacgaataaaattagtttatattctagtagattgagaatcacccatgatctctgaactaaaaaaaatcataaaatataatgaaaccctttatctattaccaaaccaccccttatggacctgccttgctgttttgcgtttgaaattaatgtcagggaccagggtgtttgtctgtgtaggcttgtttgttatcacttgtgacttctgaccagagaggataacagtttacatgacacgttgtagacatgcacaacaattagaatcttgcttatctagttatagcctatgcatgacaatgcatagttcggagaagccaaatgtacatgtatatgcagccacggttaactgttgctttatgcttatcttcatcttctatggaacaactgatgacaagcattgataccatttctctaaggtgttaatatgaccaagaagattcaacccagttagtagatacctatgttccataagcatattgatagacatttgattccctaattgtgtatataaaaaagactttgttgagaaaaagataaaaaaatccattttagtgatatttatgcatagaaaaattaatttcatgactttcaattataaaaataacacttttcagcagaaaaggtgttaatatactattcactatagaaaactttacggtaattttttttttataaaaaaatacattagaagctaatcagatgattaaatgtccaatctagtattcaattgagtagtattacaactgggttcacgggaacaattgatttattgctttcagtaacttagaactaatttctaataatttaaatatcactttcattatataaactacgcaggaaggcccaaagtaaccagaaacaaatcgcttgaagattacattactgtttactatcatatactaaaaaagccaagacaaaaacgaaagtaaggactctgccaaacgaaagtaaacatgttttttaaaccttaacagaatatttttcccacaatagcatatcatttctaacttgcattcataaccagcctttgctatgcaacttcaacaattacggactaagatcagctattaactctaaaattcaaggtcctagatgttccattcctctaatcgttataaacaaactgtaattagcagcataacagtataaacagcattccctgtaaacagctgctgaacattacacttaaaggaatttcttaaagctgcatcagaatatgtattaagttggagaaatcttagaagcttggacattccattcggaactttacagtttaatcttctcgtatctttgcttattttaatgtcatcaattcatcatccttccaaagttcctggtgaaatagaacttgctgacaatctcatataaatcttttctgtggagagtaatcaaaatgtctgttctggaaatgcagtatctcactgaaggtaaatgcttgatttcaaagcatgatgaattggagagacagaatagaatagccgcaactcataagcagcctcttcatttttcattgaatttgaatgtcacgtaattggggatagagccacagagaattacttcctggaatttcattctataaatctagtactaaacgagctgcaaaggagctatctagtcaatgtttaactgggttggagaaaaagaaaccactgcttgtcacaatagctaaattgattttaaaatcaatttagagggaaaatattattttcactgtcataatcacagtactatttaaactacacgtgagtaatttcttttttatttccaaaatttctatatttacgaaaacaaaatttcgtcgtatattatatgcataattctattgtatatatattagtttaaatatattttttattcttaatatttatctgtatttgattcctaataaaaaatttcatattattttttatatttaaaagttttattttagataactgataacattatcacttaagttacaaaagaaaaaaaaatacatatgcgaagataaaatttatcaggaataaaacacaaaattaggatatatattagaaataaaaaacatatttaaacctatattttgacaaaaaaattaattaattacaatttaaataaaaaattacgaaaataatgtagtttccaaagtattataaatgtatagcagtcaatcatgtccacgtccacacaggacatgacacagcaccaatcacgtccattcaggacgtgactcaagaggtggcgacacgtgtcattttgaggcgcgatgcataaaaacttccaaaggtcataacttttgattggaatgtccgatcgaggcgaaactggtagccacgcgctcgaaaacttgctcaaaattttttcccaaaagaggtctctaggtgcctcaaaattgcgattttattttcgatgacccaaaaaatttcttgttttctaatttttttattcaattattgaattgcatgatattttttatttgtttaattacttctcttattttcgagcattttgacacaaaatccgcctccaacgaacattcctatcaccacctactgtttttttggtatatttatttaccaaaattatattgtagatttttaaatgatttcggtttaacaaattaaaaaatgacaatattgtagtcgcaacactaatttcaacagttgaataaaattatacggtaaaattggtgatgcatataaacttcgaataatcataaattttgatagaaatgtccgatggaggcggattttgtgtcaaaatgctcaaaaataagagaagtaattaaaaaaataaaaaatagcatgcaattcaataattgaataaaaaaattagaaaacaagaaattttttgggtcatcgaagataaaatcgcaattttgaggcacctagaggcctcttttgggaaaaaaattttgagcaagttttcgagcacgtggccaccagtttcgcctcgatcggacattccagtcaaaagttatgacctttgaagtttttatgcatcgcgccgcaaaatgacacgtgtcgccacctcctgagtcacatcctgtatggacgtgattggtgctgggtcacgtcctgtgtggacgtgtttgaacacgtctgtctgggacgtgattgactgctaaacatttatatatactttggaaactacactattttcgtaattttttatttaaagtgcaattaattaatttttttgcccctatattttttcacttgcattatacaatatacaattgtgattctttgtatttttttaccacaaataacacaacacaacacaacaaaatcatattttctttgtgtgaaaggtgtaaaaaatacacaatagaaacatgatttcattgttatttcataaaaaatacgtaatggaatcatgtttccgttatatacttttttacatcccattttaattaaagagatgtattgaattaagatttgaaaagactttttttaataaaaaaatcttgtggtatttaatcaagatttttaaattgtataaataagtatagaaatattcaattaagacttttaagatttttcaataaaggctacaaaatcaaatggtattcaattaagattgtttataacttataaaaagtcttttggtattcaaaaatatacaatttttgatgaattatttttaaaaagaatttatcatactttttagtataaaacaatcttacccaaatccttaagattttgttagactctttttttttttctattggttatctgactttcttttctctcattacacatatattattctttctttaatattcttcaagatgtgtgtcatatatgtttatgttatttttttggaataaaaaaagtcaaacatactctttccctccacactttttcatttgctttctaaattaatgtttatcttttgtgataaggttaaccatgattttcttacctaactatgttcatcacatgctcgcaatgctttcctgagtgtcactcttaattttatcattcacataactagtaaccctcctacaagtttttcatcctcaccactcccttttatcccatttaaatatgtcattaaatttatcatcaaatacttgtagtaattatattaaaaaaataagaaaatcaacatatataattttaaatcttaaatctattgttcaaatccaaaagtgaaaatgagaaaattgcaataaagattaatacgagaacataaagttataatcaatttagttattaaaagattaaaaaaattatgttgattttaattttttttatccaatctccatcatttcttattcattgaatttaaaatcttaatccaatatatctttaattttaattgcaagttaccattaaagcaataaaattaattgtaatataattaatttatcatttttaatagtaattgatattttttaatcaaaattgaattaattatataaaaaaataccatttgtaaacgtaaccaaattaattattatataaataaataaccttttgttaacattaatcaaatcaatttatgacattcaagggacgttccaccttccaatagtaagcccatgtggatgcgtcgtcattgatttcttccttcctttcccattccacatcgttacttttttcaacacacattctttagtctctccctacaccaccgcacattgatttccgttcaacacgttacatatatatataaacgccaaaattctttcattttctttgaaacgccctctctctttctaaattttctcctccttttcctcactcattttccccccgccggaaaatcttccaacattgtattcatgtcggtatgtgtcatttttctcttactatctcaaatttctatgaattacttctgatcatttaatttgttccctatgattgctcattcatgttgcttgttcatttcaattttgctccttatatccatgaatcatatttcacaataattttgtttcattctacggtcacgtatataattaaacttgttttccatttcttgattttggtaacatgatcttatttgattgtctgacttttaggataaaaaagtatgtaacatatcaagtttattcacatataaggcttttcagtttaattatattttacacaaacaaatctgaataaccctcaggacacgggtcgaccactaccaaagtttggtgaatgggatgtgaatgatccagcttcagctgaaggttacacggtgattttcaacaaagctagaaatgagaaaaagacgggtggcaaacctgattcacctgcaaaggttaataatcctcgtacaagacctccgttagattcaagcaaaacacaaagtgtaagatattcgcgcatttatatgcttatttttcttttcttggttaataatgtatttatgtttcaaaagaatgaagaaacagtagaatgattgcctgagctacctatatatatatatatatatacacacacacgatgctaacattgtccttgattaaaaaagttaaggggatccaaagacccatatggcaacaatgattcaattacaacctttatgttgtaaccaaatatgatacttttattgatctctttattgaggattagtatagtctgatttttgtattcaatatgtattcaattaatatgtttgcatctagatgactggatgtctgctaaaaggttcattcgatatctagatgattagtatagttcattcaatatgcattcaaaaggtttgaggaacctttatctagatgtctgctagtagtgttgaatgaactatctaatttttgtctctatagttagttgatgtagtatagggataatttgttgaacctataatttgtttgattttttttttttttttgtatttacatttcccctctcatgaataacgttcatttgattttcagaaaaaatggttttgttgcatacaaggtcctcctgcggagtcatagtcatggttgctcttgtgtaaaagattcaacagaaaacatgtttataagtaactagtttcttccaacgaattctcaaggataggagttgagggtagtagatgaattatgtaagtgagtttgcaacatggagatggaagagtaaagaaaacaaactcttatccaaatatataaaagtggtttattgttagggggcaaaaggtgctcccttttgggccttgcattttgctatctggtatagagatttgcttgttacacattgtttatatttttttgtccataaactattttaaattttatttttagtacctcttaaaattttgcagtcctatctaatttcagacgactagttttattttcttttttaaaaaaaattatctatttttagtcatttttttatttttattgcttaaaattgacccatgagattaagtttttgcattttcttctcaagtttagatcctctcaaggaatagttttgaatattaaaaataaacaagaaattaaaatgaacacataattttttagggactgaaattagttatctgaaataaatttgaagagaataaaaatcagagtataaaatagtttgagtgacccaaaatttatttaatcttaaaaaataatatagttaggcattttttattgttattctttcttgaatattttttttttgtttcaaattataatatgaacaaggtgttaaatattaaaattttaatttttcacaaaatattgatcttggaaataaaataataaattataataattcaaaattatctaattttatatttttttacattatcaatcaatataaatatagattaggggacctttgttcaagtatttacttgttcgatttaaccactagcataacttacatgtagattattaacgaaaaaacaaataaaacgaacaatgttgtaacattttaaaattttaatattcttttttattgaaagattaagtttcataaccaaaaaattaaaggttaagttattaatatgatttgtagtaaaaaaatgtaatataagaattttcaattttcattaacgtcattgtttataaaaaaataaaataaaaatatttgaattattagtatttaaaaaaaattaaaactagaattaaccagactctagaaaactgagacggtaatttacaaacttaggggtgttaaatgcttctaaactagcttaagataagtgaaatgagatacgaaaaacttaactttgtttcttccttatattgagaaaatggttgatataatattatattttgacaagaatatagtcttggaatgcctaatttctttccggattaatcaatatcccaattaatcaacacaatttttttttttgcatgctttgacccctgttacatgtaacatggaaaacttttcagaggttactcatataaaaattgctccaaatcaagtatacttaattatgatattcttaaatgataaattattaaaaaatatatattttgttaatatatgtaatattaatcaattcgtttaagtcatgtttaaccacatagtcttatagttgcacaacttttagatttctctaatttcaatatatattcatttcatcaatgtgttctttttgttaatgatcatttttacctttcaagagtcactccttatccatgacttatccattttatattggcaatcactctcaccagcttcaatatcctatgtgttacaaatgttataaaaataagagaaaatgaattatgcactaataatgcaagacaattttatgatgtcatctagtcataaattacaaataatcatacatgataaatttttttaactcttactataataactttaaaagtcataccaaaagtgatttttgatttgttgacaaagtaattttttgtatacattaatagtgcatatccattaaattataaaaataaaatcatcggaaaacaataaaaattcctttcttttccaactaaaaacaccacaagtacattgtttatcatttgaaagctaacattccaccaaaacaatactacattgtgattttaaaaaaatccaatcaaaaggtaaaagcagagactaccttaatatacttaattccatattttgaagaagatgcatgcacttaaagccagtgtagtagatttaatagtatgagagctaggcaatctgcccttgtccttccttaagaaaaggccttggtatattgggaaattgatgagaaccaaaaacccacacaatagaacttgcaatgccattttctcaccagttaaagcaactctgcaaaggactaactcttttaaagtggctagtaagcaaaacaaatggagtaacgcaagtgttgttagtacagtgaaaaatggagaagaggttccaaactccatgacctcgttcttgtaacgttgggaaacatcatcttctataatcttagttgtgacagcaaaggatgaatatgaacgtccaaagaatttcaagacaatgtctattaaagcaaaaaggtaagaacttgttcttatgtacaaccacatcctcaagccattccaccaaccctggattgtgcctccaaaaattaaaccctcaatcaaagtagaagaactctccccgagtattacatatgcgaaaggtatgaaccatgagctagacatctgtttaacccacatattaagcacaaaatgttagttgcattctcaacacaaaagattcatttagagaagaaaaaaattatacatatacacacacatgtatgtgtctaggtatattacgtagtaaaacctaattatcagatggtcattcaaaggtaacatatctatggtttagggaaagttacttagttagttgaaaagtttttttcatttcgatttcatactcatcaattattagaaaacaagtctcacattcgtgaattaaaactaaataaaagaatgtataagtaaaaggactataagcctaaagtatcaaaatatttacaaataaacagactacttaaattaaaaatccattaatctattctgttacatttttcaataaggactaacacacaaatgataataagggagatttaaggttaacctaataattgagaaggaagaatttaaagatgaaaggaaaagagagggggaagagaacgctggttctaatctctgccgacatatttttaactaaattaacatttgacgatagaaaaatgataataagatatgaaagtccatatcaaaggaaaaatttgtactttgaacaaaatagagaaattgacgggaaaaaaatataattaaaaaaaaaggactcaagcaaagaaaaatttcagaaaaaaaaactaaggccttttaaaactcgattaaatgaaacggcctctaatagtccactaattcttatcaatttaagtggcaaaaaaatgttttttttacataagatttggtttaacaatgagtaaaataaaataatagaaaaagaacattaaatttagagtaaataaaataattgagatttggtttaacgttaaattttatttttctattattttttattggaataaaaaaaacaattttgaaatcaaatgattaataaaaaaaattctatgaaattctgaaagatgtaaaaaaataatttatagaaccatatctattgacaactccaaaataatataaatttagagtaatttataatgtatatttatatttgataaggagtttgggagagaataaaatgttgcaaatctcttatatattctcttagaaaaagggaggtcattattacctttggaaacaagggaatgcctttaaggagataaagtgaagggatgagggagtaatatagtattgccaaacaagtggttgccaaatagttaaagtgccaatatcccattagtaggcctaaattgatctttccatcaccatagcatgtaggactgtacttagaaaacaaaatttggaagtcgccttcaccccacctcttctgttgaactagtgtgtgaagcaagttagttggagctattccaaaaaaagccttccttggtgggttgtagtatattgatttccatccttgtgaatgtatccacaaccctgttatcacgtcctccacaagacatccatatattgcaccaatctacaaagaaataagttatacccacttaaaattattcattattgtactttaatgtatatatactcatctattaatattattattggcttttgggggtgtttgtgattttgaaaacagagagagaaagatcaaagtagacaacctcttttccccatagagtattttcctcataggagcagcttgctagtgccttcgattccacttttagttcatgcaagtttgctttaatcacctctttctcattctcatcatcccaatcatttttgtattgacaattgaacttcttcccacatagagcgtctcttctatgaaagcaacaagttccaataaacaaagggccaccataaccatccgcaccatggagctccaccttcatagtggtcgaaataaatgtgaaattattatttttaaatataagacttaaatatgttttttatttttaataaatattttatttttttgtttttttttctaataaatgtttgttttatgttgaatttctaataaaacaccacttgttttttgttctcgtctatgctaaattaaaaaaaattatgtttgttccctaataaattaacaaattttgttttaatctcaactagtaataaataaataaaattattaggtaacaaatataaaatttactaatttatcatagactaaaataagtgtaagggacaaaaggtaaaaaaattattttattaaacactcaatgtaaaacaaaaatttattgagaaataaacacaaaaaatcgatatttattaggaataaaaccatatttaagcatttaaataattattggacattattaatagctattagttatgtctaaattaaagaaatcacaacagatatattcttttcactaaaattatgtacatttcaaatagacaaatatttataatagttatactcaaaatatttataatagttatactcaaaagtctatctataaaacaaatagacaaatatatataatagttatactccaaagtctatctacaaatgaaatcaaatagaaacaggggtaaggcaaatggaagaatttaatctttctggaaaaacattattccattccatcaatattatctaactcacctccacaattgctgatacagcattcccgtacaaatcattcttactgaggttctcaaaattttgtggaaactgcacaaaagcaatttcttggcctttctcttcatccatgaaaaaacaaagagcatctctcactgattgtgaatggtttgagtacatgtcacaatctataattagaatgattttcgcgttgctaatcgttgaagagactcttagctacatttaggtcaatgaaaagaatgttatctttaatccacatggattgacaaatgatccataaaaagttactcacacacataattaggcagcatatatagacacactcatgcacatgggtgattaattagatcgttgacgatgtgtgccaatgtaaataatctataatctataatgcaaaagatcgcaagaatgattcaaccacttacggctcatatatacagtggtattttttttgtaaacctccttttgtaaataataaataataagcaccatgttacttgtttgctatttttaagtcgtatgaaactgtatatgttttaaccacaagagattcattgagtagattaagacagttttacatatacccagtagtaggcttaaacttctattcgatcaattttttaggtgaagtaaatgtaattaagttccttataaatactttttaagttgaaagatttttctaacatgaattgaggtactattcttcatcctaaattctttaaataaaaaatagaggcgggttttaattatatacactaccaatgaatttatagctccagctttgtagttgtgatgatattgaggtctcttctcacgagccatatacaccagagttggcaaaacaaacccatctacatccttcgaattgtgcgagttcctttcatgaagtagtatctggtaagaaaatcaagccacaagagcaaaccatgcatcaaacttatatataggacaacacaaaactcatgagccgaattgagttcaaaattattgacaaaaatgtgaacttcatatggtataaatttgaaaaacaaggtagtgcatagattaattgaaaactatgttcttaatataattttgtgcaattgcttttacgagtagttttgttactcataaagttcaactgaaagtgaagagtgaagaagcaataacttgaggaagaagaaaccagaaattgagagtaagtggtgaatgatcaattgtattatgatttgttagttacagaagagttattacaagcttatatacaatgaggctataagttgaacacttaggacctatttagatacaaatcataagtgtttgtgagagtttttctactaaaaatgtagaatttttttcaatcaaaaaattctaaacactattagtcttgtattcaaacaaactttaaataacctaactaacttctcccaaacttaactaaataaagttaagtatgctaagagttactgtgcagattttttttttcctgtgagtcacgacaacttacattcttgtctaaagaacgacaatatctttttaacaaaagttgtttaacaattttatacacatgtcgatatataattctctcaaatatatacttatagaaaatgttgagaaagtataattcacctgaaggattgtatcgtgatcatgtcgagaagaatacgaatcccattgagaaaacccattatgctttgatcttgcttcgctgggtactccacccaacttgactacatcttctattcgtcttttcatatctacgtatagtttctacaacaaaataaaagcacactgttgtgagaagaaaataggcaaccttcacaaaataattagaatatgcaaaccaatttatttaattttttaaaatttatctcatgatatattcttgttatacaactttttattctaaaaaaaatgcaacttagatacttaaatggaacttaattacaaaaaagttgtgaattaatgagattgtcatttataaccaaaattatatatgtctaattaacaagggtatcattataaataaaaaccaaggtcaaccacctccaaacaatttgaaattttaaataattagttaatttgtataaaaggcttgattaatttagtcaaaccttatgtacataacaatagcaagatttagatcaaatttatggatttccattggcaacaagtgacatgaacaaaaaaaaaaaaaaagtgattactccgcaccttgatggcatctaagtctttggcatggttatggtcgtgtgaatttgttgagacaagggtgttaaaataagcagcaggtgacctcggttccaccttaaatctcttgcagaatggcatccaatgcttggcaaaggtagaagcctctaaaagagcataaaaagttatgtctgagcctgcatcatccgagagatacacactgagcttctctgctggatagtcataagccatcacagataacactgtattaatcaccatcatgggtggctcaatgattgggtctgccgtgaacacaaaaatgtccactctcggcaagctactctcatatctatcacaaattaaaacacacattatataggaaatttacaataattcatcatatataatgctcaaccaactgaatttaagtgattgtttaggttaacaggttaaaatttgatttataaatactccaatcctaagtaattggattgggtagtaatatataattacttgtaatttctaatttttctagatattaaaacatacacaaatatttgtaacaaataaaaaaaaaaacaattttaataatttaaaaaaaaatcaaaaaaatgttttcttaaacacgggaacaaattaaaggtgtagatcgaacttgaacctttcatagagtctattgatgaaggtttttctgaacagcatgttccagcggagggcttgaccaaagagccaatataagccggaccagagctctgcagcaaacaaaccaagccaagcccatttgccatatgcgggtatgtggctcaatctgaaagcccagatgaagcatatggccacaaacaaagagattgcatagatccttcgaatgtgccttcctttgtctttcctagtctcaaacagtgaatagtcttcaccactctccattaccttcaagttttctatccagtgttcttgttgcacttgcagtcggttaattttttttcttatatttaaattttttgcattggagcaatatgttattcattgatatttcttatattgtgtgatgggtgttgcattgacagtacaacactccaagctaagctaaaaggtgatcacaaatgtactgactaacccattgacattgacagcacatatagccatgatatatatatatatatatatatatatatatatatatatatattgccaagaaagaaaaaagaatgctaaaaacaaagctaaccgccaaactctatttataaatttaaaatatatttaaatctttactattttgtacccaccgcttgctatcaaaattaattatttcattgagaaattcttgctcttgctctatatcatttattatgtaacatgtaaggttattattgttttatacattaataagtctttttaatttttctaaaatattaatcatagttaattttaattttttcaaataactacactaaaataagaattttcctgaagatgttgcgggtgttgatataaaattaatatatattctaaaaaatttatttaaaaaaagagaaattgatatattttaaaaaaatcatccaaacaaataaaaaaaattggttgcatttttatttttttagcagtttttgatttttactttacataggtttacatttaaataccccaaaaaaataagaaaaaacaaaagtataataacttaaaagatatttttgtaaccaactcataactatttagtttcaatcatgaatatgatcttactttgtattataatgagagaaaaatttaacttgacaaaaattagtatttaaattttatcaaattcattatttataacttgtttaacgtcatatttaaatggaatattaaaattttccaatataaaacttatgattatgcactagttcccaaataattttgcaaccttttacgttttccaataaatacgtgttcattattagtagcagagttatacttgtaatttttcctctcatcataatacaatgtaatatcatattcatgattgttttgataattaaaaagactcattaatatagaagacaataataactcacattgcttacatgttacataacaaacgatacagaataagaaaaatgtcttgttcatggaacaaacaagaatttctctatttcatcagtgatgtatgtttgactttttgacgagaatgagattttgacaaaagtaaatatggaaagggattgttttgagaagtatttacaatgatgacgaaggctagggtacgaaagcgtaactcgtgcgtaacttacgaattacgtttatagccgttagatcaaaattatcagatcgattttaaaatgggaaaccggtttgtaaccgtgtatgatttttcttttttctatatttacccttgttgctaagcaccccgtgttgtccttggctccctgctgcattttgcctgcgtcagtgaatgtgacagccatgagaagacaacgctcctgtcaatggccattatttgtcatgatatagcttgctaatatattcataataataaacaattgtatatatattaaatatatatatatatacttataaataaatttaattaatttaacaatagaaacaaccatttaatttaattcttttgtttttataatatttaatacttatacttaataattgacttgactcaatttttttaaataattttcttagttaaacaggttaaattacaaatctttaaattaaaaatatctattaacttgcatattttttttatttagtaacaaaatattttaataaaatattattattaatacgatatgttatattataattattttaattaaattataaattatgttagtagtttgactattagaatcattttaatgtttaaaatattttaatttctataaatatagacggggaataaaaattagagttattttttttggagcttaaaagatttaagtagatagtaactcatcttcacgacaaatataaaaaagaattaatattttcagtcaaaataaaagtattgatagatagatatcacacctacagagatactgtgcaatctagtttgagtagacattgacacaataaatactaaaaaagaaaaaaaaatagtcttcaaaacttaataaacacattggtagatttttaaatttttaaaaaagaacccttgaactaacaagttgatagatttttttaaaatagaaaaatagacggtataagtttataaattggtagagtttttaaaacttaaacaaaataaggatttttaattaaacaattggtatgttttttaaagtagaaaaaatcaacagtttaaattaacaaattagtaaagttttaaaattaaaacaaaatgagtagtgacaaattggtaaatttttagatgggatgaattgatgataaatagtgtaatataaaaattccaaacaaatatatcaaacaagatcaattcatcattaattttaatatttatgaaactaagtgaaaaaacaataacaatagaagatataaataaacaatattatcacttttttgtcagcaaaattaaatatatattattattattagtagcaaggtaccaaaaacaaaacaatttgaggaggttatggtgtatttcaatcataagtagagacatgttgcaattttatttaccaaatattaaaaaataatttaatttgaaaataataaaattaaataatacaaataaaaacaaattaattctaattaatatttaaacgcatgtacttgcacataataataatttaattttgacaatcaatattataatacataaatatgtttattataaaattgtaatataatgaaattctgagataaaaatattataagataatttattttaactattgatgatttgtttaaaaatatatttaaaaagatattagcaaaaaatggaaaataatatattaaagaagataagaaattgacaaaatccataaaatgaaggttaaatatagaaaaaagaaaaatcatacacggttacaagccgatttcccattttaaaatcgatctcataattttgatctaacggctatgaacgtatttcgtaagttacgcacgagttacgctttcgtaccctagccttcgtccaatgatgatagggttgttttagacactacttatccgatagtatcatgtcttcatatattagcattttttactttttacataaattatatatataattgatgtaaaagatgtttcattggttatatttgtaatcgatataaaaattactttttacataattataaatataacttcaatataatatatatatatatatatatattctaattacatacaattgatatgcagaaattactttttttgctaagacttggaaaatgaatgaatgtctgaaacatgaaaatacttcttaaaagaatccgtttgcatatttcctttctccaaaattctcattttcgtcaaaaagtccgtatgtttaatataaaacttattactataattagtttagaacatgttttaagtatatttaataatttaaatattaattttacgaacaaaatgaaacaaatacttatgtaacaaaaataattgttattaccaaatatatagtgcctggacgttaaatttaattaggtaaatcttaaaatgtagaaattaaacatattagtataaaaatatataaagaagtgtatgtctaattaacccaaatatatattatctaacaccttttttcgactcattttttttattagttgaaattcctaaaatcatactaaattgaaaacaatatctattgtacgaagaagcagacatacataattcgtgggtctcatgaatttccctaacagaagggagtatgtcaaatatataatattgaaatgtgcattgctagtatttcttgtaaatcaaatattgggaatctcaatgtccggtttccatgaacaaataatagtggctagatgtatgtttagatacatgaaaccaaagtactctaataaagataattagcgcacatacttgaagcttcaagtcaatgaagccaaactaggaactaagaaagattcttatcactagtaagtatgaaccacactttcagtattgtactttgacatttaactagattagcaaatgaaaggtgctaggcaacaggctaatgaagccaagacaatggacttgagcataactgaagatggtatgcaacctttatcactacgaatgaaaagtgcctcatacactggtaaactgatcattaccaccaatgaactcagtgtaatctgcatcatcaattggctagagctgaattccaaatccatcataatcctcttcattccccaaacgagaccaaaaagatttagcaatgccactgtagctaatatggttaacatgattgaagagcctccaaattcaatgacctcttgctcatacctcttttggacatccttagtaaccactttatccgtgatgacaaattttgtctgtgacagtcctaattgctttttcatggtgtcaatgaaaccaaagagatacgaggtggtcctatggatgaatttaattctttgcaagttccaccaaccctttgccgtggacccacaaatcaaatactcacacaagctaaagccatatgtagcaagaaatgcatatgcaaatggaaggacccatatgcttgaaaactgcaaaaacacgaattagagttaaataagtgcaagaaaattaaggaatcaaatcaagctaattaaacacatgagataacctgtgggaacagtggaatgccatgaagtaggcaaataggagaaacaaagacataacagagagtaggcagagacataggagcccataaaaggtaattgcaatatcccatttgtacaccaaagtgtatcttcccatgcccataaatgaaagggcaatacttggagaagaaaacttggaacatgccttctgaccacctcatatgttgaagacatgctacatccaaggttgttggagctatgcccacaaaagccttcctttctgggttgtaataaatcgatttccaacccctgcatgagattacaaggccagtagctatgtcttccacgggaataccatatactaatcccttctgcaagattcatatatattattaaatattgaaatttctgagataaattaaaatctacacatgagcgcaaacctctttcccccattgagttccctcctcataggtgcaagtggcaagagccttcgatgcttcattcaattcatcaattgttctattatcatttcttttaggcttcaggtcccgttttgctttgtaatctatcaagtaagctcctgatagactttctcttcgatgtaaacacccagttccacaaaataaggctgctccatatccacatatgccagctagctcaaactttatatgcacatattaagaaaatcagactcaatatactgttggtccatccttatgtgtgagtttagatatatgtatactgtataaactataaagtaattacattattttattatttaccttactgctcacaagataagaatttgcataatggtcattcttggtgatgttattatagctctgtggaaattgcacataagctatatcgtggccttttgtttcatccaagaagaagcatagtatttcttgaattgtatttgcattattggagtacatatcacaatccaagttgagaatgaaaggggcgttgcttatctcggatgacactcttatctgcagaatgaaacttttgatatgtgacactaacaccaaataataatagagagttttctttcttttttgtttgttgttattggaaaaacatagtcaaatacgtctttgaatgaacaatttgaaaatatcatcatcaatgtacaaaagacaagtttataaagtgagtggaaaacatagtatactaagatataataaaaaaaaacttaaaaagggtttaattttcaaggttcttatctttagcctaactatttcaaaaaaaaaaaaaaaaaaaaccttagcttaactgcaaagcttagggtagtatctaattaaagtattaagatactttaagtgaaaaaaatatattagataaagagttaattaacttttttttaaaatattgttagcttgcatttgtaaattgtaaggtaagatttaattcttttaaactaaaacgaaatacatttttacaagtaaaatataaatttatgagtttaattagcatacactgttaatgtattgctgtgagaattactcaccagtgcattaacagctccagctttgaagtggtgagggtagttgggtcttttttcgcgtgccatgtatacgactcttggcagttgaaatctgtcttcatctacagcatttgtgtctcttccgtcaattattatctaataaaatgaagaataaagattatattgaaaaattagttatatagaaaactaagatagtagattaattccaacgtgaattcttattcttttgtgaaaataaaaaatgtccataccctcacgataggttggtgatcctgttttgttgtttttggattccattctgagaatcctttgtgctgattcctcacattatctggaaccttgccccttgctacagctgattcaatctcatttttcatgtcttcgtataatttctgacatatatgaaatggaaaatggggaaatttttcatcaaagaatgcaatctcactttttatgtcttaattcgtataaatgagtaagatttacagaatcaggcaaaacaaattaaagaaaaaacaataagatatgtatttaactttttattttaaaaactgattatatagaaaacaaacaaataacaagtaacgtatttgtattgaatttgaatttgaattttttcactaacaaaaattaataattaatatttattaataaaaattacttttttttgttaatattgtatatatatttttcacatatgagacaatcttatttgagttaaaaatattcagtaacctaattttgaaattttgaattcatatataaaactcaaatttaacattttatttaagagaattagatatatatttttttatagatcccatataaaatacaaatttaagacatctgattaaactaaaataacttatttcaattgatctatgcgctcagctcattgtatctatatatctattacctgcactaattagttaactaattgttacctttcaaatgttaaatatacattcattaatttatttaatacttgtttttttttctaatgcattcctttccgtataacaaacctttgaattaaaaacatcaattgttcaactccaagaattttcatgtgatcacaagcacaccgtgcccgaacaatattagtaacaattgaagacagcactatatggacatatatatataatcattgataattcaacgtaaaaataaaaaataaaaaaagtcagttaccttgataaataaccatgcttggacatagtcagtggtattattgctacaagttggggcagcgaagaaaacctctggtgacctaggttcaacattgaatcttctacagaaaggtaaccaatgtttggagaaaatggaagcctttaagagagcataaaatgttagctctgagcctccatcgtcagagagatacacactcaatttattcgcaggataattgtatgccattgctgataataccgtgttaatcgtcatacatggaggctcaagtatggggtcagccgtgcacacaaaaatgtccactgctggtaaattctcctcgtcatatctgtaaagacatgccaaaaaatattcatcatatttttactattttacgtataacaattacttgaaaaaataaaatttaataagacacacactcaaatatccaacatacattgagctctaattcaagtctggaacaactctacttaactttgccttattatatataactgacatgcatcatgtaataattaaaaaaaaatatcaagtttgaaactcattaattataacaaagaaatccatatatatatatatatatatatatatatatatatatatatctatctccaagactttatttccaaagtttgtgaaggttgtttaatcagagttcgaagtattggaactctattagttactatagtctatagggcgttagagagaatgcaatagagattttgacatttccaccttcaccactaatttcaataatggtatggatgatgtgacatattttctatattccttattataacacatcatttaggagaattgatgattttttataagatatttgtaatttctaagcaatactttttttctaatactagttacttttatttaaatattctaagtattaatatttttttattaatagtaatatgtattattctaaaattttaatattattcataataagttaatgattatatatgattatgttcaaaatgtcttataaaaaagaataaaaaattatatgatgatttagttagttgaatgtgaaaataactgaagaatagattatatatttaaaatgactaaaattagtcaaataagaatagattaaattaataagttgtatgcgccgtacgtcatcacattaattgccatgtgatttcgtatcatacaatctgttaatagatagatatgaacatcacatgactactagatcacgcaaggtgtctatatagtgatatataactattaaacatactgacacgaaacacacttctcatttatcaacaaaaactgaaaatgtttataaaattaaatagagaagagactagcaaaaaataaattaaaattttataaaaaccaaagttataatttaaaattttataaagaaaaaccaaaaacatgtttaatcctacaactaagagtactggaagtgacctatgttaaattgaattttatcaatttttcaattcaatccaatcaaactcaattggatttgattaaattggatttatcttctttttttcaacccaattcaactttaatttaattggattaggttaattatcggattagatcataaaaaaattgtcatatttaaaaaaattctcaaaacccaaaaatagtaagaatgtttttttaataaaatagtaaagatatctttagaaattattattaaaaatattatactattgatacaataaacaagaaaaaaatgtatgatcaaactactatttataaaataatgtattatcttaaaataaataataaaatatgttcaatttaaaatttttatattagtaatttaattacatatgagttagattgatctatgattgaatctaaaattcaaaacttactatcaaatttaattttaattagatttactgaaataaaataaatgcaatccaataatttaatttaaaataataataaaaaatagattaaattgaattttacggatttgccacccaatccgcttacaccctgaccagaactaattacaaagttacttagtacattcggcgatgcacacatcctatatacagccaaaaatgatgcaaaagctgaaacctaactaggacaagtcatcatccgtcaatttattttcggtcacactatactcgaataatataattttcttatgtataaataaatagaagccgcagatatggattccggaaagaatcacattattccaacgtacaaaattaatattatacttaattatatttatgttctcaaaatatttgtgaaatggaatataggaccactggagggaatgaaacagtataaaaagttgactggcaatgcaatgtttagtctttaggtctttaatttatttggtaattggtttacgatactactccgttagacttttcgcttgtttcttactggctattgatgagatttatttgaaaagtcgaaagagtgtaaagtagtagtattgagcgtgattccattagccttttttgcagtggctcttaatgtgatttagctaatgagtatatttaattcagcggtccatgttcctttcactttttttgttaaatgaatatcaaattaagaaaatagacttatatagttgaaaatgaaatacttctagttctagttaagaatgaaagacatttaggttcgttcatttgtacgtagagaaatatataaagtgagaaaaaaaaaatatgagacctatatttttgtattattttaatttaaattttttttatcaatttctttttatttcatttcttttcactacattgaatgaactcttagaaacaatattattgagagggagggagaaaaacaatcattgaagtcaccacagtgtggtgaatgcatcttgcaaggattcagtttgatcgtcattctcaaaggataatatatatatatatatatatatatatatatatatattctaacttattttatatacttcttattatagtagttatcacgattttcatttttttctatgcttcattttccctacactattccaccttctatacttgcacatgtcaggacagatatacttggtatactttgggggtaattgtccccacaaatctttaattttttttcttttaatgtactccatacacatgtgtaaatatacaaatgcttctcatgatgtgaaatgtaatatataattcaatgtataatataaatattttcaccatagatatatatatatatatatatataaatgataaatttattaactttataaaaattatcttaataattatattaacaaaaatttatcataattaacagtgtaaatttttttacaccaacagtccaagttattttaactttataaatattgctcacagaatataatttttttttattcgtccaattttaaggtgtacgagtggaaatgaagaaagtgagagaaatcaataaatgagataaataatgtaagcaaaaaagcactatacgtatgtgtatgtttaatattttcccctggacatgaaaaagtaaaaggagaggatgaagaaaaagtaacctttgtgagagcctgtgtttgaaaggcgtttggtgaaggattctccaacgaacagattgagtgatgatccagtagaatccaaaacacaactctgacaccataacactaatccaagcccacttcccacttttaactgtggggatgtttgccactctgtacacccaaataaaacatatagctgcaaatattgttgatgcaaataccttgtaaactcctcggaatcttgcttcttttgtctcgaacaaactaacatcaacatcggactcttgttgtctcgcaccttcttcctctctcattctctctcccagcttctttctcacgagattctgtgtttgtgatgtgtggaaagggagatggacaattacatatggtatggactattaatgttatttattcacatcgcggaccgaataataaaaatatcatcgtaaatagtctttttcttaatatcaataaatttattcttttgaaagatgaaaatttaaattttattttgaaagtaaaaaaaaaaagtatgacaaattcattaatatgttaattttcgttaattaatgttaatgaaaaagcttacctgacacataaagacaaaaaatgtcacaaaatgattgttaacatgattgctaaataaattgaaccaaaatgttataagttttcattagactaattcatcgaacccaaattttatttcatttaagggtaaaaatataatttaatatttatctttcccattttttatcgttgaaatcataatattacaataaatatttaaaaatagaaaaacaaacataaattagacgtttgttgctctaaaatttctaatgtgataatatatttatccaaaatatgaaattcaaacaaaattatacaatcattaagttaattcttataaaaaatgagacataacttaattttttcactacctaatactatcataatagaaatttcaaatcaaaagacaaattctgcttattaatcaatatatattttatgcttataattatatttgttgtaatttatatttgttttcttattttttaaaatatttattataatgttgtgcttgcaatgataaaaaaaatatgaagaaagatgaagattaaattatattttatctttaaatgaaatgaaatttgagatctaacaaattaatccaataaaaacttcctcacattttgatccaatctatttagtaaccatgttggtaatcatttttgtctctatgtatcacatagattctttcattaataatgattgacggatagataaatttatcacattttttactttcaagactaaaatttaaatttttatctatcaaaaataaatttattaacactttatacatataaaaataaaaataatcatttactcaaaatatcggtgctcacgtattcttatcatcttatacttgtcactgggcagatattatgtttagcaaaaaataaaatcaaacatgattccgcaaaatgacaaaacatggtcaaaataattatgggagtttgtaattttagattattatgtcaacttacgagtttgtaattaataacttgttatatgttatttgacatttagcgagataaagaaatagtagaggttttattagaatatatatgaccattcggtgattaaagttttcctctgcacatttaataacccaaatgtaaattagaactcgaactcaaaattgttctatggaactcaatagcaaggtttccaaatataattgttcataagaaattaatattcttcacgtattcttatcatcttatacaggccagatattatttttaataaaatttcaataaaatatgtttccacaaaatggacaaaacgtggtggagaattcgaaagtattactacgggagtgtacttattaagatttaatatataaactttcataaataattctttaaattcaacttatcgttaatagtgtctttaattgattggttgtaatactactagaattattttttactaagaatagtgttttttatttatcacacattggtacatgcgttaagatatgcctattaccactatgtcagcatgaatgtaattttaaatatgattaagtcttatcaaaacttatttttataattggtttaaagaactaaaatttataaaaatatcttaggtattattggagagtttaagtctctaattacagtgattaccaaattaaataaaaaagacaacactcatgtgtgatacatatattcaaataatactacacatatgtactcacattaagtagtactctattttctaagaaaatatttttgataactaaccgatatatattttaaaccagtttataaaatttcaagtaaatctaaataaaatgtagttaatattattttatcacactattttattttcacgtgttatctgttataaaatataagtaaatatctacttactagataaaacactaaaaaatatctaatatatgtgaaatgtaacatagatgatcaaaatgataatatccaatgattcaattattatattagttaattttgtattctacaaaaaattattataagcataatataagtatatatacaagtttaattgctaatattaatttataatgtctctttctctctatatatagagggatcaaattgacatatgggtcgattttaaactacgtaccaatttgtattttgaatatataaagtcaataacagtcgcagattatgatttggtcattcattcatagtgctttgaatcttccgtaaatcaagaaaatgaagagaaaaaacatacagaaaatgtcattttatctattgtatatgtttgtgaatgtaacctttttctatgaaaaacggactcacttcacatgtatcgttttaaattggaaattggtcaagtcaatagtatgaacaattcaaaaacttactgaaataaaaaagataaaaaaaactatgttgacgatgtaagtttacattgtcttttaatataagttatatatgataaatttattaattctcataataattatattaaacgtcatgcaatcataattttttattagataacaatataaatttgttatatacattcatcgtgtatgacaattaaattcaataagaaccagatatagaaaatttggttagatttgatatctaaaacttatacttgggaattaattatagactattattactatttaattatttattattaaatttttcatctggtgcaagacacaatataatcttttatattttttatttgtatataaacttttatattaatacaaatatacaataatagcgtgtagcagaatgaatttaccacttactcccctcctctcacttatactttgtttagtttaggagtaaattgtgttgtttgaatagataaataagaaagaaaatagtaaagaaatttctctccgcttgtttggatgggaatgaaaaaaagttatatgaaaaatatttttttgctaatgattaatgaataaatgatattttcaacaaatttatttgttatttttataaataaaaaatttttaaaaatgcgtgaggctttgtgtacaagcgatgtaacccttcagttgtctggcatttttgttttgttttagcaagtgcatgtaagagggaggggatcttgttttttcttcttgtctcattccttgcattgcatttgcatgcttcaatttcaaccaagctctcatttctcctttatcctcattaatcttgcaccccccagttttgtatttctatgcaatatattggcactgtgttaaaaaaaatattgccttgaaattttggattgattatggttatgttaggtaaaattattttgaaaagttaattgaaaattgaaaaattagttgttaattaaaaaattaatttattaaattataagtatttgataaattaattgctaaagtagttgaaaagtataaaatgatgaaaaataataaaatcatgatttattttaaaaaggataattaaaaaattagataaatctaatgaggataaaaatgaaagaaaatataaaaactagaaagtaatattttaaaaaatgttactttaaataatatttcaaaaaacattagaaactattaagaaaatttgtttattgaacatgttttttaattaataaaaaaattaaaaactaatttaaatatcttgtcaaaaaaataacttaacttcctagctgatagaatgtttcagttggaatgcaaggaagggatcgaacgtgccagtatgctctaacctcttggtacggggaaggaagttgtagtctttcattatcgatgctctatacatttagggacaaaaataactatttatccatattcaaattctagtcctcaaaaatgaaaaaagtgcgacaaattcatctacatgttaactttcatttgttattgttaatgaaagacataattgacacattcaataacgaatttatcaacattctacatattcagggacaaaaatgactatttatccaaaatacaatttaatcttcatatttctccctttattaatcgttgcaaacataatattacaataaacacttaaaaaataggaaaacaaacataataataagcataacattgattaataaacataatttttctgttactttaaaatttttattgtgacaacattaggcagtgacaaaatcaagttgagtctcattttttgtaaggattaacttaatggctatacatttttatttgagtctcatattttgggtactgtactgtcatattagaaatttcagagcaatagacaaattcgtctctaaatgcgtcacgtaggctctttcattaacggtaacgaacagaagttaacggatggatagatttgtcgcacttttttcattttcggggattaaaatttgaattttcatctttcggggacaaatttgtcaagactttacacgtttcgggacgaaaatgactatttatccaaaaatattatttctcattcaattgaactcaacgtttaaacaaatacagcttagtgtatggactcaatttcttttttttcttctttctctttacatgtccatttccctcttacacacatgcattgaggaggatcatttccaaatgagttttagttgaaatactaataactaaggtagttgcgattgattcctataattcatcaaaattccaagattactcttctccaaaaagtattatggtatcgtgtttttgctgcacaaaagggggtgtgaattttatgcacaacaaaattatgattctattgcgcatagaatttacgcttccttttgtgcaacaaaaatatgatgtcgtaatatttttcagggaggaaaaaaatacacaacaaaatcatgattcgttgtgcaaggaaggttaaaacatgacagtattacgaaagtgtgattccattgtacaacgaagtcacactttcgtttagtattctttcggagagaaaaaatgtacaatgaaagtgtgaaatttcatatagcaaaatcatgattcctttgtgcaacggattgttgttgcacaatggaatcatggcttcgtcgtgcatcaacaacaacggaaataaggaatttgtgatttcgttgtgcgaaattttgcaatggaagtataatttcattttaccacaaaaaaaaaaatacttggcagcgtgagtgcaaggaggggttgggaagtgtggggtggggtgaggtggggaagggtagtttgttaattgtctttggttgataggggccaagagaaattttgttgggtccaatagcaattttggttgggccaataataacaccctataactaaagacttgacactaaggtagtattcttttaaagccccaaagggaataatgatttcgtcgtgcaccaacaacaccgaaaataacaaaattgtgatttcgttgtgcaaaatttcacaacgaaagtataattacgtttgaccacgaaaaaaaaaaaaaaaagaagcatggcagcatgagtgcaaggtggggttgggaagggtggggtggggtggggtgaggtggagaaggatagtttgataattgtctttgactgatagggactaggagtaattttattgggaccaacagtaacaccatagtactaaagacttaacactaagataatattcttttaaagcccaaaggttgaatgtaccaaaaacaaaacaaaaaatcccaaaggttgagccttaagaagacattcaactagaataaaataattaattacatcaaaataataagtcataataatactaagacattatgagtgagaaaaataaatctttatgataagctatatcctttttaatgtacgtaagttataggtgaaaataataataaaattataactttagtaatatgataatactaatgatgataaagtctgattcattggagccttatcataaaatagaaaattaaaaaaaaaaatgaaatatgtcacctgaattcgattaagaaaaactacgaattttcgtcatgaaaatttaggcttcttttttctgttgtgcattttgaatgtccagcaacttccatcccatttgtagctatgttggatgttttaatttgattggatgctttattaagaactgagttgtcttatgtttttgtggcatgtacaatgtgttgaatattcctctcaatgcttttggacccaaatcccaaggcagtgtcctggcccatttccatttagggtaaaatcctaaatgaagtgtctccctatatataccctcattatgaggtgagacagtgacgaaaagttgcagactgagaggcagacgcaaggtgcggctgcagagaggctgagcgaaaacggagagtgagtgtttcttcggttaagcgaaccgttgaggtgtctccgagagctgtgagctgcttgttgagaggttttttacttctgttgtagcgaggctgagagaagctccggcaggtggccgtttgagcatttgtaaccattatttctgaatagtggattgttctggacttggtcccgtgggttttccggtcgccggttttctcccacgtaaaactatatttgtgtgtgttgtttctcccttctcttctctcgtttaatgtttgattgtttccgctgcattttgtttgtgttttactctgtgttggctgctgtgggttgagtcgtgtgattccccagtgttacggttggtgaaggaagttcccagtcgagaagatccgagttcagccgagaacgcggactcagggccgagttgtgccgagtacgtgaggagttgaccggagtgtagccaacgggttgtggtgccgagccgatctcgcggtgacggatagcaaattccacaacacaatgacaatcgcaattgtttttcctagctagtcattctccatttttttcttcttttttcttttgccatctgctctgtatatatcagactaagttattttgggtttcattcagtaaagaagataattgtataaaacatgagagatgtatcaaatttgattcgaaagcccaattagtaatccaagaaatgtaaagtgttggaatccacaagttgactcgaaagtttcactaactatttaacatgcattcttataaaacgcaccacaaaactgatatttgtttatgacatccttctgtcagatttggttccctgtgtggttaattactagctctttttaagtggaaacataattccctgctgggtactagtttcagtagtatatatgaatatatactgcaacactacctatgcctattatttgatcttacaacaatttcagttacctgtactactggatatgcttttcatttactcccaatatgacatttcagatctctctctatataaagtccacaataatatggagtctgcatgatacaaatatctagttaactagcagctatgatgaattcttgagggtatatatgggatttaagatcaatctcaaaacccgttaatcagacttcaattaacttagagctagtgtgggaaatttaattaattacaagagagatgattctcttgcttatggagcagattggtagaaaggagaagtaaatcacagaggtggagatagtattatcttgtagtttcatatatgcttaatgttaacccagttggaaattaatgtaatacttagctatttttttatttttttatttattgaagaatcgtcttggttgcattaacgacactgatcatttacaatgaatcatcattaattactcactcgtttactggtaacataccctaatcaattaatagagaaatattgataatgatgggcatgcagctattaatcatgatctatgcagcgagcgcgcgacagcgtagcttacttgattgagttgacaattataatgatcatgcagcagatactatcacggtatttcgacagtatatctgcctcacctcaacttcaaccctttaattatatcactgccttactctcatgcaaacaatgattccattttccctccttggttttcacttctctttaaaggaaaaaaaatgaatatttctcttttgtatccttttatccttttttctctcatttaaattaatgaagaaaattctatttatccctttctccaaactctttttttttttttttctcgacatcaaattaaacagaggtacgtacataaagacaaatatttgaatattagtctatggatgtgtatgcaaaaatacctataattatctttttgtaaaatttgtattttgctaaagagtaaaaatagaaataacttaaaattgtttttagttttcagttttttagaataaattggaaattatttaaaaaatatattttttaaaaaagctactcaaatatttattttttaaaataattagcttttttcatggtccaaaatgttcaaaagtttttaaaatgtattttgttaagaaaaaagattataccctgtaaaaaaatttacacaatcatctcatcataatttataatatatgataaatttgttggcttttaatataattatcttaaaataatttaaataatgatttctttcttttaaatagaccgtaaaaagataataaagccaactaaaactatcgtgatttatacacgtttctatatagactagtacaaattttgggcatatcctcctcacttgatagtgaaatgtaggtgtggaagtagaaaataaccataacaaaaggatttgaaagcaaaagcattaagtataatgggcctttaaatacttagtagctgcccaatgcccactccaatccatttgtaggtcaagcagacttatccaagtcccaccatcagacaatagaaggcgacttatatatacctgccatgttattttctgaggtttcggccccaatacattaacaaatcattctcctatgaacaataatgaaccagagaattagaaacttcatataagtgtaactttttttcatgtctcaaattttgtaagtggaatccgatgccaaacaatctcaatccataattaattaaattaatctacaaagatctcactgatatttgaacttaggatatcatgaaaattattctaaactttctatcactagatcaacccgggtggtttataattaattaaatcagataacaaacttaaaaaataaaaatagtaaccctgtgcaaatccgtgcctcggttctatacaatcaaatcacgatgcgataaattatttattaccccttttttagaggaaaattatttattacccgtataggtataatacatatttatgcattagatttgaattactactactcgatatcaccgttgaagaggatgtatatgggcaaccgaagcatgaagcatgaagcatgaagcatgagtgtcccaaataattgctagcaaatgttcatgttcgagacacattgttgaaaaaggacaagagagcttgtcctttgccttcttgctgatttacatcaccgtcactctcattttttttaaataaattaaataaaaaatttcctttgttcattgtgaagtgagggtggtggtgacgtggcgaaccatctttactacaacttttattctgacagaattttcacaagtcacaattgcatagtgctacggataacatatatgatcttaaaaccattataactgaattagaggaatcttgaataggaacaagttgcacatgattattcccttttaaactcttgagtctgaaactgacatgctgatgcaaaatttgtctttaaacacaccacaccttttcgcaattttcacttcaaccaaactcatctctctctctctctctctctctctctctctctctctctctctttctttctttccctcctcacaattatgtgaacattcttcgtcgcgatttcactctgcaattcaatgtcacactttcccttctcatgaaaattttcaagaagcacctctttgaaagtttttttttcctactctttttgatatttgtaggtgatttttcttgtggattcagctaaagatggaaactttgatgtggttttgttgatggggttttgttaaaatgtctgaataggctacttggtggttgctttttgtgtggatttgaaaagaatctctgatatgtgtgattgtattgagtttgatgtttacaatgtgttgtgttgatcatattcatactgtaacatttttttttttttgcaggttggcttcaaaggccgttaatattatttaaataaaagacaatatggtagccaaaatcaggcaaagtgctgctaactctccaaatcccacaaaaccagtggttggagagattgacaccagtccaccttttcaatctgttaaagatgctgtttctctatttggcgaaggtgctttctctggtgaaacacctcccaatgctcccattaagaaggcaaaatcgtattttgctgaggtaactgtttttataccgtaattttaaaactatatctgaattctgaagttgcatatcaaaaagacaaaattataatggaccaatagttttagtgtaaaactcattcctagaattggtgtagaggttactatgaatctaaatttgtgtttgcaccacgtgctctgatggaaaaagttttgagtggggtgaaatgtgaaaaaaattggaaacttttattcttattagttcaaaatcttctatattgttataatttggacttcaaaatttgacaatttgttcaacacaatccagtatcatgctttaattcagttgccaatgacatgtccttgttaacatgtatcatattcatgaatgacatgctctcatttaccacataagtgaaaattgtttctatggtttgttatttcattagagtgtttgggcaaaggtgagacaacttcacttagcccagaaagacctgaaaaaattaaaggaacaactaaagaatgcagaaactaccaaggctcaagtcctggtggagcttgaaaaggctaaaagagtggttgaggatctctcacaaaagcttaaagttctcggtgaatccagagaatcagcaattcaggcaacagaagcttcaaaaaataaagcaaaacagcttgaagaaaaatgtggtgatcctggtggaaccaatggtgcttggaaagaagagttagaaactgcccttaataattatgcttctgtcattacagaacttgatgttgaaaagcaagaactgagtaaaatttgtcaggggtatgatttatccttgaaagcaagagtttctgctctcaagcaagcagcagaagctgaagatgcaatgaaggcaaacaccgaaagagcatgtgagctatctaaagaaattttggctgtacaggaatcagttgagaaaatgaatgctgaatctgtccaagcacatcaacttcaagaagagacattagccaagcaaaaagttccaagacaatcatatgaagccacccttgaagaatcaaaaaagaagttgcttgatttaaagaaggaattcaatccagagcttaccaaaaatcttgaagtgcagctgaccgagacaatgactgaaattgtggttctgcaaaagcaaattgaacataaaaagacatcagacttggactctttgaaaagtgtcactctggagcttggtgatgctaaggaatcactgcagaaagtagtaggacaggaagactcccttagaagcatggtggaagctcttaggatggagctggagaatgcaaaaagagaacactctgaattgaaggagaaagaatccaaaactgaatctgttgccgagaatctgagggtagagctccggaaaagcgagtctaaactcgaagcctacttggcagaagaatctaaagctagaggtgcatcagaggaaatgatcttgacattaaaacagttgttgtctgaaactgaaaatgcaaaaagggaaacagaaggtatgaagaatgaggcagcagaattgaagatggaaggtgcagtcactaaacttgtgttagaagatgcagaaacaaagcttaaagtagtgttggaagaagtggaagcagctaaagcagcagaggcaagtgctcttgatcagattaaggttttatctatgaggactagtccttctcattcatcaacttctgaacctggtgcaagaattacaatctcaagagaggagtttgaatgcttagttaaaaaggttgaggagtctgataaattagcagacataaaagtggctgctgccacagcacaggttgaagttgcaaaggctagtgaaaatgaatttctaaaaaggttagaggaaacccaaaaggaaattgaggatatgaagactgaaacacaggcagcgttgaaaagggctgaaatggctgaagcagcaaagagggcggtggagggtgagctcagaaagtggcgcgaacaagagcagaagaaagcagcagaagctgcatctcgaatattggctgaaacactgatgtccccagaactttctccacagcactataggattcaaatgcagaattcacctccaaacaaggtggagatgaagttagaaaaagggaaggtgtcagtttcaaagaaagttctcttgcctagtatcagtggcatctttcacaggaaaaggaaccatgttgagggaggttcttcttcttagcttcccaggaagaatcctgtatgaaatgtctcttgcctagttacagttttgtgcggctcatgaatgtgagagatacacactggtttttgtgaaagttgagaccaatgcgatcagatttttgtcaatagtttggtcacaagtattttattaatgaaatttagtatattattgtatattgctacttcatgaggtagtatgatgaactattttacggcattcactgtaatgatgataataactattaaaaaaaccatacctttatctgtccattcttctcaattatttgatgctatttatgaaatgctaataaaacaattgttattactctttttacattgcttatttgatgctttatgaaatgctaataaaaaggcatggttaggatttctctttttggcaaactgtattactgaggcaaaaatgagatgttgcttcaagctgtttttcctagaaaacaggtaacaaatttacattaaagcaccatagaatatatatttttcattagattagataataagataatttgacaaaagaagaggaccaacgaaaccctcataatatcaagtgaaaaataatttatttgtaataatagggcaaagactaaggaaaattaaaataagattattgaaaatgatttagattataaattctttgcatgtttggaagactgaacacattggtgtcatgtaccgatcaaatgtccagtaattcgggtccatctgataaattacaaaaaggtccaattctgactgttttttgccttcaggttggacgggttacggttgagtccaaacgggttggaccaatattgggtcaagacactttggacttaatttattttctttcaaatttttacttaatttattcatttgtattgggccatattgtcaagtcatattttatcattttttttttgttatttaatgtgaattttgtattgggctctttaattgaaattaaatagctaaaaggttaaaaaattgaaattaaacttttaatattgagtcaagtcggatatcgatatattaaaaattgtgaacccaaattggattgtcaaaaatcatttgggatcgaatttaaaacccgcttatctatgaaccgtctaaatccacccaaattcatttttttaagtttgattatgtcgggttcgggttcaggtggaacccatttatttactcacccgaagtcacgccaaacaataaataataatatcatctattagatgggcacatttgtatttaggtaataagatgaacatgtaagaacattaggcctccagtaaaagcactgaatcgcaagaaagataatctaataataattctttaaaccaaaaaaaaaatagcagttagggataaaacaatttttttaaaaaaatattatactgagaataaaaaaattatataacatttgttttcaaataattataaatacaacaatacttcctaagaaaaaatcaaattttttatgctatctatcaaatacataagctaataaaccaaaaattaaaaaaaatccattataataaacatttttgtaaatcctgttattataaattctttctcttataacaatttttgtatttctttcttttctttgcatgaaggttgcagttaataatttgtagacaactctacagaatccccgaaatcagtagatccaggaatgccgaaggtttgggcattggattggatcgtcgtgagttggcaccatcaagaaaacaaagaagccatgaatgacacgtgttacataattgatgcacgacccgattccaccgaaaaatcctagtctcaacctcacaggaacgcaacctcctccaacatcatcaaacccctcgaaataggaactattgaattagaagcacagcacagacagactcactcacacaaagttgttactttgttagagagagagagagagagagagagagattggttgtgttctgctactatggcgagtaacagagagagagaagaatcgctgacattcacaatcccttcttcctcttcccattcttctcccatcaccgtctccgaccaactcgacagttacctcgccgaccccagaagcgcctccggaagcttccagaacgacggccttctctctgccggagacgtcgccgccgacgatcccgacttcggtttctcccgacccgatttccggcagagccccctcgccggcaccgtcgagttctaccgacgccacgtcttcctttgctacaagaaccctcgcgtctggccaccgcgcatagaagccgccgagttcgatcgcttgccgaggttgctccatgccgccgttgtcgcaaggaagagtcacatggaaaaggaggtactatactatactctaccgccccttccttttggattttgtttgtgtgtacgctgtttaaggtaattgatattagcaagcgttgtgtccacttagttacactgttttggctatatcactgttcgaggtatgtgttaaaagagtttaattgaatatctggtgaaaatgttgcttcatcttacattgtgttggacttatgagttctctctttactagattcggttaacgatatgtgagggtcatgatgggactgagacatctaatggggatgtgttgatctttcctgacatggttagatacaggtgagagtattgatcttaaaggttctctgttattgtttcccttttttcccgcttcttagatcattgtggacaacaggttttagtggaattgcaggagattaacgcattttgatgttgaaacgtttgttgaggaggttcttgtgaaggatggggaatggcttcccggaacgcctgaggcgttgagaggttcgtatgttttcgtgtgttcgcatggatcccgtgatcgcagatgtggggtttgtggacctgtcttggtcagtagattcagggaggagatagagttgcatggtcttcaaggaaaagtctttgtaagcccatgttcacacattggagcaagtcagtatgctggaaatgtcattgtatttggacctagcatgaatggagaagtcactggccactggtaaggcgaacacctgaatggttactaaaactgctactttcagttacagaaatttttatttattgttttaaatcatgcaatgccattgtaccattggttattatgtttgattatgtaactgattgatattctcctcaattaaaatatgcaggtatggctatgttaccccggatgatgtaccttcattgcttcaacaccatatcataaaaggggagattttagatccattatggaggtaattatttcctgtaatgctttatttatcttctttaatgttttggcttaaaggttacatctttaagtttcatcctataaaagactatatagctaggcttctgtatattttcaaattgaaattgtggtcaggcaagaagtggcatcttcataccctttatctgaagatatgacagctttgcttcatatgcctttaaatggcatctgtgacctaccagtttggttgttgactgtttaagctttttattcataaattaaaattataaattccaaaccaaggacttagccacacacaattaactcctattgtaatgttattccttactctttcttcaaattttcagaaacctagcttcaaccattacttttcaagtacatttctttctgcccccttttttgcgatggaaaaaaatttgatgcattgggtgacagattccctcttcggaaattgacatggtgaaatcctttacatggttatgtatcaggctgatggttatgaaaactttggagcatagtaggtccatggaacatatgctgacttgtatatgttacttttttttatattgccgtcaggggtcagatgggtttatcagtagatgaacagaagaaaaagcaagaacagcggcttctgctgaatgacttgagaaacttagaagacagcactcaagggtgtagagctcaagacaattctgtaagctgctgccaatcaaatggagttggctgctgccaatctaatggagactcctttttccatcagaatcacgtgttattggaaagaagaatggaccctgatgtcattgaatcagaggcaaagctctcagctgataataagagcagtgagactgtgatttcttggatcaataggatcaataatggcaaaggagcttcgtgcaagtttccgtccatgacaacttggctcaatggctgggagcaagaagatacttatgcagctcttgctgttttctgtgctgctgtatcagttgccattgcctataactcctacaaacaattgagataagagagatcaactttggcagcattattaagtggtttagataacttaagcctttactataaaaataaaaaaataactacgtactccattacctggaggttccacgttatgcgcaggtaaggacgagagatattgtacgcatatacaaaaagattattttcggattcgaactcatgaccaacaagtcaccaagataaaacaagccttaagcctttactatatctggatattagcttcatgtctgatattagtgcagttcttctttagatcagtccttactgaacatgctgggaaacgagtgaggatgtgtgtgctttagtgcttatagagtattattggctgaggcacttataatatgccagttagcttatttttgtatatataagaaactttagccagagtaatcaaatttaatattttaacactgtttaggtaggatttgatttgtaaccttttacaatttaatgtaaagctttttgtgttcctcgaacttgctagttaatcctagaattgtgtggcgcataggtgacaaatgacgatagtcttgcctgaactttcatataaaagaatgcagcaccttcagagattctcttacccatattgggaacagaaaatgaaatcatctagcacctgattgatgaataattttccaaaatgaatagaaagtacctccgtatgcaaagatattcaggttaatgctagccctaagttttgtcaagaaaaggaggaatcatgaatataattgagaaaataagttgtagtgtagtttataacggcatggcctttttttttatcctaggcttgatatatttgatataaaaaggaaaatttttgttgcaggataatagtgctcataagtcacaacacgaggaaaatatattttctccaactgttctattcttagttccatgcataatactgtctggcaggcacggttctgaacactgtagttctacatttttgtataaataccataccattaattgacgggggaaaaaaaaaactgtaacttgatgtcattcttccaagactgaacgaatttacttgctcatcgtccaggggttataaaaattagattaaaagttattcacccagaagtttgtggcaacttgatgtaatacccgtatattacattacatccaataactgaagataacaactgcaaagaacaagtaactcgatcggaccagaattgcctgcagtttgaaagtaactgcagggcactgcagacataatccaatcctccaagtttttttgagtcatatttcattttgttatttaatctataataataattttgtggaactcagtttctatagtcttggcaattttggcatcatctgggtctggctctggcaagtctacatggaaagaatcctgtccgattggtaataaggactctatgaatatagcttgctgcgtgatgtaattatagagttgtttatggaagacatgatcaaaggaaaaacaattttcactatttccagctacatgatgtcggggcaccctcgaatccttctttctgcaaaaatgagggagggatgcatagtccattacctgttcaaattgttaagtatgtcaaaccctcgcggatgcaacaaattctagtaagaatgaagtaaattcaattcggtagtactatttttcaagtctccatccatatcacaggttaattattaacaagaacaatggacaatatgactttaatttagtcaagagaactaaaaggaaaactcatgaaagatatactgtacgaggggtatgctaatgtttaccttcagtaattcctccatgccacaacctttcagtacgtgaactttcctccttgttctttcttgcaaaagaggctttacaacctgccattgtcattgaagagtttagctgtaattgtcaagattttgatagatccgtatgaactccttcaacataaaaactggcacaaaccttccaacacgctgagaatacatatggaacattaacgatgtaatatgcgtctgtcttttctggatagttcaagtcgtctattgtagatatagctgtcaaaagctgaaggtggccaaacagaaagtgtcaactaggagatcatctagtggatagataaagtgagaagagaaaaacttcaataaatggccaatcaaggaacgttcatatgattaaaaacatgaagagaaagagaaataagaagtttttaagttactggcataccttcaattggctcagtgccgagagttttaaaccagtcatatccaagactttcacacaagtgccaatgtatcgtccatgattctttgtagcttttggctgcaataaaaattccaataaacaatcagggtgtagagaatttatgagggacaacaaaagacactctagatactcaccaacatcactcgatcccgatattcgttcatttggatgtgcgactgtacataatatttgtcctgaacaaaaataactggcaatttaacatcatgaaaaataataaagtagttcacatgctacaaaggaaaatggacagataagcagcactgaacactgcagcaccaatgtattcatatgattgtaaggataatatggcttagagatggtatgtagtccttacaaacacttcatcaaatgtgctgagcccaacaccaacagcaaggacaggtaggccctggcataactcagccaaaaataaaataaattagcaatcatgcattttactttatgtaagagatgacatcttgttgatcatctgctatgtttatacagtcgtacacaaagatgtcatctcttacacatcattcattcatacaggttagaggcagagaagaaccatgagggtagctgggtaggaggaaaataaaataaatttatgcctgagatgaaaacttatacctcctttgagaaaccagacattcctacaagttgagaatctcgcaaacgtctgtacaaatcagggggtataggcttctgttaacacaaaaaagaaggaaaatttaaacaatgatagacttttatgatcatgaattcacaatgattgagaaatatgatagacatctagtttatgctagaagtgtgatatgatcaaataactacagagaccatgtaaatttcattctccagtgatagtgataactaggtttattttatactttttgcaataacatgcatctttatctcggtatctctaaagtttggtccttgacactctgacatgatactgtgaattcacccccctccccccaaaaaataaaaagaaagaaaacatgcatccgtatctccatctgtcacataatgcttaactgctttaagatatgttgttccaaaatcaataatatgcacagtaaaggaactcaccgataaaacattatcaatctcattttccactctccattgtaaacaatcaattaactgttatagttaaaaccgtcagcaaagtgttcatatccaatgataactctataagcaatcaacttgggaaaatttccaacaaaaaacttttactgcacacaatctaaccattttatgtgctttgacaacattcccatcccttgctttgagaaaccgtactaatgtttctgttggatagccccggtgcataatctgaaatgtaaagagcaagctttcatgacagaataaaggaaacacccatgatgatcaacatctattatcataatgttcgcagctgtgcttcagtaaagaattcttgccaacggcgaggtactggtcatcaagatcaatttagaagcaaaattttaattttttggttcaaaactcccaccccaactgaaatttttaaaatataaatataaattgtggcgacttattttatccaagatgaacagatacattcatcaagttataacttccactgattctttttgtcattatctttctcaaaacttaagatcaagtaaaaccaagagactgaagagccaaacctggaatgtgttcttctgttgctcatccactacatcgagagaaaaacatattaaaaaaaacatggaaagaatagaagatatttgtcactaacaaaacactattagcagaaaagtgtatgctaaatgcttacagttttccataagggactgcaactgcttgatagcttcctgattagtaatacacatgttgctgtttatctctgtggtgacactagattgaaactctgaaactaactggatgagaagttttgaggacaacctgtgactagggtttgaaataatgatctttcaaactcctttatgaagctactgtccacaaaaatttaaaatgaacaatagcatgtgaaatacaaaaaggtataaaatctggctttgttttgtccacttcacgaagcatgcaagtttcttggacttagatgcaacttccctatgaattctgaactgaactgagtgatcgtcattataaaataataataattaagaaactgttaaataaatacaaacacggaaaggaaaggaaaataaatgattgtttggactttggggacgtttctatttgtataggtaatagcttaatatatgtgcaacggaataatataaaaacttaatttaagcttatatatggtacatatacggagattaggaagtttcatttaaaatttgaaagtttggtagttgttttccgaatctttaaaagatggaaaagaatgtggatttattttatgaaaacgcacgtagtgcttaattttcattagatatatatatacgataacctttttccttttgcttgaagttttcggtggttaagaatagagatgctcactaataatgcaaaacgaaagtaagagagaaaagaaaaactctgcagaagtaattaagacagtgatagatgatgccaaattgacaagttttttccatgttaaggatcgatgccttgatagttcagcattatcaagttcacttgtttaaaaagagagattcacttcactttaatatataccgaataacgaaatgatatggtgtggctgccgaaagaagaatatcagaatatgtactgcctcagtgttattcacacagtcacacgcatgcataagtctcaccttgaataaaaatggataagttaaaaaatccgcaaacgtaatgtcttatatgaaatttacataagaaagaaaaaagttcatgtaacaattatatggaattcacaataaagttcagggaaaaaattgtacctccaattgtttgtgcttattacctcatacgatttcaacctattatttatttatttattcatatgtaacattgtcacgtcaaatgttttctacatttgttgagatgtcactttcaattatattattttattttctcatgtttaaaaatcttcatgccccgtctcattcttttatcacacttctaattatcataagcaaaatttactctagtataagtaaatggtttcaaactaccaataaagattcgtccaatcgataacaaacgaatttatattttaaaagaatataaatttaatttttgttgttgatgtgagggttctattgataaataatatataaatatttttgtaaatatttttttatgtttgaaacctgtatgactctatgaatcctggtattcaattcacctaaattattagccagaaaaaaatgatttcaaactcctttttaactaaagattcatttggtaggaaaaaagttttaagttttctaagaatcttagattgcaaatcttaggtggtattttggttaaggatttattttttgttttcatttcttcataaaaaaattaaaaatgttgataagttattgtcagttgtgggcttattttttaaaatattttttgttttaaacaaatgcatttactcttattttttgttttctttaaaaatgaaaacaaaaaaacactcaaattaagcactaccttagtttcttgtgcttggtatttgttttaagaaaataagatttcaggaaattatttttcacaaaaactttctcatggaggtgagaatcttattttcccgagcttagattttcttttattataataaaaatattatattattcttattaaatggtaaataattaaaataactataaaaatatcacgtaatccttcaagttttaagaaatttatgtaaatgtttttataatcaatcaatcaaatagattttactcgtttctagaaaatatgattcgaagattcatgaatagtaacaatgtcttgaaataccaatatcatttaaaggattaattcattgtttttcaatacacaagaaattatgttaaaaacctctaaccacatggcaaagttattacttatttgccaatggtttcaaactcttaattatcataaacaaaaggttcgtgtcagttacaaaaattgcttggtgctaactatatgtcactcttgaccaatcaaattcaaccacaagtccttgggtgtttgcatttgagaggacatttgaataagcattacttttctttctctcattcataggaactagaaccgtatatatggcaactctccaagagctttttcgtgccttctgtttccatgcacgtattgctgccatgaagttcattttgggcctttctaatggaaactcttttctccaagagcaaccattatcatatttcgcttcgtgtttacgttattaatttgagatttgggtttcttaggtataatatcactaagaatccaatatcaaaagaaaatatatcaccaagaatcattaaaaggcttttaatctttatatatggtgaaaaagattgtggagtaggtatagtgattagctttgagctaattaacatgtgaggaatcctattatacgctgaaaatataagtcgtacatatagtatatgatattcgccatgcaccttatatgtgctttacagtatctgatgctgatcgtgaatcaaatattgatgacccttctttcttactgtttctcaatgtcaaaactatgatgccagaatttactgtgtttgagctaaaagttttttaatagggagtgcataacatttctagaattaacgaaccaaataatttttattatgagttgccagatgtacctttcttttttatgataagcgaggtgaattaatgaaaatttaacttttatacattttcaacgaatttaaacgcaagtaagcaatgttaaaaatatgatggcactatgtgtccaaatattggttaaaaaaatggcactagctacgtaaaaagtagatcataagcgagccatataacatttcttttatagaaatcatgtcgaatggcacttgacctattttaggtccagacttcagatttcaccagcttctctcaactctcaagcatgcaaaaaaacttccaattcaagaattttcctacttgttcaggaagttaatcgtggcgtttggcaactctactccttcaaagagtttgaaaccgaaccagatgcaattagataagtgctactgtcatatgaatcatacctagtatatatatatatatatatatatatatatatatatatatatatatatatatatataagcagagaactgattactgatacacagacaataatgggggagaaagtagaaaccatcataatcatttacggattttatacttgattagagagattcagaaaatacggaggcttcattggattacacagcaaattaggtacatggatgtaatacatagaatatccaacaattccaaataaatttgcatttcagacagtaaagtactccttgatagcttccagtacccggtttgctacttctggaccaaacaatctgggaaagcttgaaccaagatcaatctcaatggtcttgtttctaatgagaccatccctttttttcagataagctctttctgcctctcccacctctcgcttggcacaagcacaatgatccaaccagatccccaacacttgcttggaaatggggtccaaatggtccctgatgatatcctccatgcgttccactccgccattttccgtcagaacgcgaaccattatggctgtaggagaggaaacagtgcggatgtaaagggaagaagagaagtatggttgaacctctggaactctctccagagtctgcctatgtttgtctagttgagtgtcctcatagaaagttttgaggtcatctggccaaagcacaaggtctttccggggaggcaaatcaagaatgagaactagcattgttggactactgcggatcatttcaaacacaaaatttggcgcatcagttgagctgttaagataggctgaaagacttgttatatctaaggaccctcctgttggtagctttgaatgcacccagcttcccaacacaaaatctatctgagacaaacaccaaaaaaagaccaaattcagaacaaaacaaatgtcatcatttttcttctaaacaaaataaatccattaaaagggtggagaaaaatgtcagcagtagctacctggcaagagaacggaaccaagcattcacatccctaatcacgtatatcactttctcttccttttcttttttctgttcgtgttggaccttttctccttacacatatccaccccaaaattcgagtgtatgtttattcttttccttctttttttttttttatgtacaatgatagtaatgagatttgatcttaggaactcttgcaaactactcaaacccctcattgctaggctgaccactcggtcatgtttacactttgccattgctattcaaattaaagcaagagtaaaccatcaatttagtctctcaactctcaagtattaccctctctcctaaatagttcttagagtattggatattcatcaatttaaaggatttcaatatttgaaggactactaaatatgatttctaatcattgagggatcatttatataaaaactataaatttagggataaatttgatggcttactcattgaagcacagaaaaagacaaaagttatacattgcccatttgcttcagtatctaatccggacatagtagcttgagtacctaattctcaacccaatactctgataatgccaatacttgatttagaaacccataagccactaaaaaataagtcaaaacgaatttgggaagataaataattggcaagggaacatgaacaatgtaggggctgaaaaaaaaaagagagaaaaaaatgaaaacttagtattgaaattaaatgtgtgtttggtttcacaagaattgattcttggtacataattgattttggatcaatttttacatatttgatttcacatctgaagatttcaaaattgattctgatccagaattggcaactttgcttttgcgttggagcaaaaactttatattaagttttattcataatttgattccataatgaaaacatccaaacataaatcacatcactacaaaatcaatttcatttaaaaataattttgttaaggctaatccaaacaagcactaaggattttgggagtagaaagaagagggggaattaccggggagtcattatgagctgctctaatatgaagagaagcttgggcagtggcagtttggctttgataatactgaacatcagaggggagtgtgcaaggaagaagctgagtgtgaaagcgattctcaagcgttgagacgagatcaaccataagattcttctgggcagatgaaacgaacggaaagtccatgaatttgctgcggccttggttgttgtgggtctcctgattctccatgagagagcaagacacagaaaaggaagaagaaggtttaaggctcgaagaagaagaagaaggtatagagcgatggtaacgaggtgaagaaatagataagatggagagtgctgaataccgcaaatgctcacatatcatcacttccatcatcactacaacaatgtcatgtccttctccccaaccttttaacttttaatccttcacgtctttctttttctttttgcttcccaagcatttctttctatttttttttactcctaaccaaaatttgaataagagatatttaatatatataaaaattaaatacgtgaaataattttattatttatttttgtgtaaaattaattatatcgcaatcatgaggatggaattttattaaatattttttttgtacgaaaggagttttttttttaaaaaaaaaaatacaaatggagttaatcttccacacgatatgcatagtgattaactaaagtcaacagatcatcagcatctggtaaataatgaaaaactgaggcttcgttggtaaatataaaataaagaaaacttgtaaatcggttctaatttaattcttctggtttatatagataatagagtttccattaaataaaacacaaatatatagaaaatttggtgaagtggttcatatttaaattttttattttatattacttaacatttaaataaataaaaaatttattaaaaatatgatgttatcttagaacatctccaaaagtacaacttaagtaatttgttttgagttctatatttccgttaattgacttccaaaataaatatatgaaatttgccggttagaattaccaataaataaaaaaagtggttgtcaaaacttaaatctaggtataggggtaggcatggcaatgaggcggagcgggggtgaatattgcatttctcgtccccgcctccgactcaaaaatcgctcctcgaacccgtctccgatctccgtcgggttttaaaacccatactcatccccgccccactagggttaggttttccccgccctcctcgttctttgaaaatcggacaaaaatgttaattaagtaacaaaaaacaataacaaacccatattcaaaatatgcaatcataatttaaaagttacataacaaaattaatcaattcaataaaaaaatacaaaataatatatatttttttaatattatttattacagggcaggtgcgggtgtgaggcaagtataagtaatctcatatccgttcctatccctatttttggttatcgggaaaaatccgaacctaaatctaataaacttgattttttctgttaaaattgggatggattcagacggatacccacatattgagatcccgcttttatgtctaataacgggtacgagaatgtgtgttagggatgattggaggttgttacttggctacaggaacaacagatacttcgattagatttgtggctaaactatgttatttgctttgttacttatttgggagataagcaaattttgtggctcacagtcttttcagggcctctagtctaaaaaaaaaacttattcatcgtatatgacattttttattgttgttttatttccgacataaaaagattttatattttagtatctacataatatgtttataaattatgagtatctacagtttattaaaattataacggtgccacaaaaatgttaatataggaaattaaaacaaaggacgatatgtcaagtgtagacaccaaaatctagatttttttcttaattaaatatatttttcatctattttttcgttttgttcctatagtttctttcattttaatatttataaaatatatttattttaaacagtaaaaaatattttaaacaataaaaaatatgttatttaaagtattttaaagacgaaaaatcaaaaaacatattttgcaataattaaaataaaaaattgtaatgacgaaaaatatatttatttttttctatataaagatcaaaacaaaaaatataaaatttccattaaagaccaaagctaaagatgatgtaagtatcaaaaacaaaaaatgatagttatatttggtaaaaacaattgaaaattttaaaattagtttattaaattacaagtgtatgataaaactaactattagtaattgaaaaatataaaataataaaaaataataaaattataatttatttaaaatatgaaattgaataaatatattaaaaattagaaactaaaaagtaaaatactattttaaaaaattaaaaattattacaaaaatatttatctaacaatcaaacaaactttttaattaataaaaaaattaaaaatcaactaaaatatcttaccatacatcaccatgtctaatgacaaagtcaaatgtcacaataacctgcacaaataataaagatcaatttataaacggttttcatactataaggactaaaatgtactgtaatattttttcatataaagacctgcgcatccaaaggtgtagttatgtttaaaacaaatatattactttcagaagattgaacttgaaagctggatcctgatagtaattaacaaactttaaaactgaataactaaaacctccgcaatattcttgatattaattaactccaatcttcctagcaaatcctcccaagcactttccactgtcattcctgatcccattcaccgaggtatttagagtaaccctcctaccaagagatggagcaatccatctgatatttgtataactcttgggctgaacaggaggcaactgatataaactattgcatggtactccttccaagccgttgtaataatctcccaaaggtttataaggtcaaacaaatgaagggtcatggtcatggacatgtttatttctccaagtccacaacctgtgacaagcaaccgcccataaagtagaccaacatttatctttcttgcttcccataaaattatcaagattaagattaatccaattgtaaagaaaactgatatgatcaatgatgttgtgccccaaatgcaaaaatgaggaagtccagcataggcccaagaggagtattaagccaaactgtgtgagactgaatatatctattactgatatagacagagtagaacattctggaggagggttatgtgagtttgttagtgaatggggtcattctgttagagggacaactctattagaataaggaaattggcctagctatagaaatgctgaatattgtctgattcctctctcttgttattcttctttggaggtttctctgtcctctattacagagaatttatcacacatcaaaaacatttatgaattcaggttccagaagatgaatccaaacagtaaaggctgaaggacaatcacaaagaacatgcaaaatatattcttctaaggaatgacaatgaaaacaaaaaggagaacccgatccccttcttagtaggcaatctagcatgagctgtttgccaaataaacactcggaccctctcactagtttgaagctaccatatatatatgttggtatttaagcttccatgttttcctccaaaagcctccactatttgaatattgaaaattattatcctttcatatgcacttgaaacagaaaaactgctcattctatcacctatctggatttcagagtgtcttttattcaagagtgttcaaatccaaactattccaaagtaaaaaatcaaaaaccactaaaaataaaaaaccgaaaaacctaaagaaattgatactttttaaatttatttggatgttttttctttcgcaaactaaacagtttggttcaatttgaactttgtgcttttgaaacggattcgaatcgaaccaaatcataaaatttatattactttaatgttatctattttatgtatatgttatttgagtttcacaatgttatgtagtgttatggatacgaatttatataatgtatatcaatttttttaaacgtctttttttaaaatatgtttggtttaaaattgatgaaaatttgataaatttttattatagaaggtttaacatattaataagtttcgtagattgttattagcaatttttaatgtaatttaatttaaaagttgaaaagaaaatatataaatcttaatgaaaatcaaaccaaccgaatcatgtgttttttaagtttggtttggatgactttttattaaaaattgaaccaaaccgagccatgaacacccttacttttatctgcaccagaatcaatgtaagctatacatttacatatataaaataacgagtcatactttatatcacaattaacacaagttaaaaatattaatatgaaagatttgcacaagaagacacattttaataaaggttgatgagtcataatttttttaatatatagttatattaaacaggtcatagtacatgagacgactaacataatgcacactcacaaacacaggctcattagtgtgtgattattacatgaacatatggcttcttctaaaattatgagcctacttacatttccattagcaattgaagtcaattagaattggtctagataatgtcattttcaaatacccaatgacatatttcgatttgacctggaccaaacccaacttacatgagaatccaatttccctagcctacgttaagcccccaaccaaacactccagagatgaacaagtcatcccacagggtcctgccgttttcataggctacgatcataagaccccgaccaaatccaacttaccggagagccccatttcctgagcctaccttaagggcttgaccaaacacatctgagaaaaatgagttttcccacagggcccccgtcgttttcataggctacgaccataagatcctggagagccccattttcgtctccaagcatatgttttttcacaagagcatgcttaaggaaggaagccttatgtcgatgctagatataagggataaattgccaaaaaggtcatttttgccttgttatatgttatccaaattgtctttctcatcttcttagggtaagttgggtttggttgggatcttacaaccataacctatgaaaatggtggaaccatgtgggatgactcattcatctcaagagtgtttggtcgagggttgaacatatgttagggaaatgaggctctccgagaagaaataataaagggcagaaaaactaacccaattaatcttcccatacatcataaaactccctaacaatacaactcacttcctagtgttttcttgtgtgcgtgtttgcaatttgcctgtgtgcaatattgtgtgcgtccgtgcaattttttgcatgcatatgtgcaatttaattcagatcttcagtcacaaatctatacaataatgtgtacattgttaagatctaggaaatcaatacaaaaatacacaaaataattgtagatacaaaagtcttgttcagggatgatgcgaaagcatgtggagatctgaaacctattatctttgtaatcagaaaaccatcatcaatggtgagacgacgattacctcgtcatcgtccagggaaagaatagttccttccatcgcaaatgacgccatcgacggtcttttccatcatatgctccctttttctcaacatcttatcccttccacaatgcctctgaaaacttaaaacgtagagatagggggtcacgagcaagtcgtcaagatccttcttcgtccttcttccatagttacaatgttggttgtggcactaatttgtgtggagagatggagatcatatgaaagggggcactctagatttgaagaagatgggaaaagaagaagagggataaatttggaaaagtagaagaaatgggaatttgaaaaggctttggcactgtgcacaaggagtttgggtgtggcaccctagactctatcctattacagtattacacagtaacttagcattgttacccactagagaaatcaaagtgcaaatgtagagtaaaataaggctacgcaacaacaaagatattctcgtcgacaacacaaattggcggtttcatagcggcttcgacatctcatttttgcaaataaaagggtgaaagattgaagagaaacggtcttgcaacaacatgggtaggattttcaaaatcgatttagataacacaactcaaatacatacaagatcgcaagtcatattcagataacattttacgattccaaaaaaaaaaaaaaaaaactacacttaatcctttctaggtcgtaatacctgatcgggttaccaattttttacaaaatcgacagttcaaggcgtgtgaaatcaggttacatgcatgaacaatcctactattgactcaaatcgagctacatgcatgaacgatcccataaattaatttggtccgattttcataacactagcttgagcataaataatcaaaaacctgaataaaagaaaaggtctcaattaagacataaaaattaccagctgtgacagaccaaaaagaaatatacaatgcattttgagatctgattatatttaatgcagtatagaagaaataacatactgctctcaaccaacagccacaccacacacgacctgccacatattcgcctaaatgccaccctcacaaaagatcttcacacccctgccatccaaaaaaagaagtttcacactgtaaaaataagtcttttctcttatcattattttttaccagctccccccgaaccacctatcaccatacaaaaatcatattccagccacttccacagtcaacatcttcatgaatattttcaagctgaaaataagaatacaaatggtaaaataaacatgtcttaatgtgatcttaattctttaagagtataagcttctcatcaatttgttgtacagaaacaataagtaaaaaacctcgcaaacctctaccaaaaaagatgctgaaaagagaccttggagatttcggaagaccatcatggttcgaagatcagtagagcaacttgagtgttttaaaaccttaccaacaaatagcatgttctaaagatagttatgaccattgttgtcaagacatataatgttcttggactcaagtcaaaaagcactaaagttataacctgaaacttgagtgttttaaaaccttaccaacaaatagcatgttctaaagattaaagtaaaaaaaattaatttaacctaaaaattatcgtcgagacagttgagttaatttaatgggcaaatgattatatttatattttagtgtaatgacctaactaatccatgtgggtgtaacgtacattgaacgatttctcattagtagactgtagacgttacatttgataatgtatcaataatcacgtgtattaatattcacgtgctatgtcagttttctgaacttgttgagtgtaaaagaaagtctatgtgaacttccttcaactatacatttttcgcaggtttaatttataccacattttggcacgtgaagtttttgttcattaaataaaagtataattcctaaaatgaaatttattttgaccagcttattgtgataaacaaaaacgtctcataatttatatttaccaaaaacaaaaaaagtctcatcatatatgattcttttttgtcagcatcatttatgaatgttattaagaatcattattagatgtacgttaaatattaaacaacgttcttaaattgtcaaatttacatttaagattaaattaagaatttgatccttacacacctatacattgttttttcgttttattatataggtgtctaaaaacctcaagttattgatttttttttttcaaaataagtttttaatctctaataaatatttaaattttatatttatttttaatacttttttaacattaagtctatgataaaacaataattttatttatgtttcttacatttttttaattaatgataaatagtaaatttgtatttatttcttgatatttttatttttattattagttttttttccaaagagaaaccgataataaaaaagattataaaaaaataaacacaaaatttaataatatattatgaactaaaaaatgtaaaaaattaaaaataaatgtttattttatcaaagaataaaaataaaataaacattattaaaaaataaatttaaaattcacatatttattaacaaatcacgtacatattttaacttcttttttttttgtaattttgtccatgacggttgagaaccacttagaggcctatgcacttcaaccagttagagacctatgcacatcgcgagcgaaagaaggtacatagcttctcccctcactaaaatggaaattccttagacagtcttatctctgaaccctgcatcatcttaaagttcactgccattaatattggcatggaccccaatggtgttgaatggaaatctgataatgcagccaagtgggtacttcttttctaactttcattaccagattgtaattccattcattatacattgttgaataagtccactttctttcttgtccaacagctttggaatcgcttaacaaacatcaaagagaatcacaaattccagaaagctagatggcaaggaaggtcagcgggtagaggactcagctttgggacttcgtcatattaccaatgaaatcaaactgtagcatcatgtaatgtatgtcatttttcattttattgtttacataagatattcagctcacacatactcattttattgctaatataaaaacttaatttaagattatgtattttatatatgtaccccctcggcctactgatagttcacttaaaaaattacattcggacaggtacactgtacatttacggagattagtaagtttcattcaaaatttgaaagttaatattaaaaaactacaagtttggcagccgttttacaaatctttaaaagaattcggattaattttatgaaaatgcacgtagtgcttaattttcattagatgtactttaaacagacattaaaaattaaacaaactgttgagatatcaaattctgaatcctgcatggtagtactaagattaagattgctttttgtatggagaaaaaataagaaatcaaaaagtattggtatgtaaaaaaaaactattaaattatgaaacccttctttatattttccatacatctagttaaatattctcattttctagtatgatatcaatcatcaatcaatctctctctctctctctctctctctctctctctctctatatatatatatatatatagtataaaacatgattgataattgtgcccgttaacacacacgacaaacaataattaatttagattctgggttattaaatacatttttctcttaaaacaaacaaaattaacaaaattaacaaaatcattaagaataaaaaaaacaaccgcatttaaaatatttaaaattacaataaaaaggaaaggagaatattttcaatacatatttattatattgatatattaattaggtttaaattgatttttcattgaaaagaacagtcttttgtaaattaacaataataatctgaacaatacacacggtcattaattacgtactagttaatcttattgaagactaatttatcaaatatcaattgtgcatatgagtccctaataaaataaatatgcatgtgtattttttcaaagaaaataattatttcaaactgctactatgccaactcattcataagagaagggctaaaaaaaataagacagatcagagaacagagtcaaattctatttactccttagagcatatagaatcaattttggtggtcaactcttagagtcataaacaagatttgctaaaataaaaggatagaacattaaaatccgccttatttatctcgtgtgatatttagtaatatacattgttgatttgatcatgcttacgtcaaatatgaataaactaacaccactaaatggtccaggcacacatgtacgttttctgtaacggcatgctcggtagtgcacacgtccctataaaatgataccaacaacgtgaggtcttcgcgtgcctgaacgaggaaagagagagagagggttcaagaaccagatcccggtgcaatggctggggtcgtcgacaatcagcacgactcaaaacttggcatacctggtactattacaacaccaaataacccaacacaacaccccttcatttttgctaacatatttccttccttgccttgtctgtcttatatactcatgagttaacattcattatagtttattttgattatcatgctgtaacatgttatttggttttactatcgggcgtatgagaatgaattaattggtatgaaattattgaaccttgaataaaaaactgcattacatgttcccaaaaaacattatcgtccatgataattctttgccgcttgcgtgaaattgtctggtaccaacaaataattctgtctcgtcggtttttttgtgttattgttgttgttgaagagggatcaccaaccaagtgaaagggagtggtttaatgtagagtttttttttttttttttaagtttattcatgaaatctgcaataaagaatttttcaagttcatccagaaaacttgtaattttatcgaagttggtgaatatttattaacatattctctctcttgatcatagacaagagtgtagagccacgttgaatttgtatttgtggtgttgtttgtgtatgccggtaccctttttatcctttttagtgtgtacgcgtgtgtttttcttcttcaacatagctatacggtgaaggttgtattgtattgtattgtatgtgttgttgtcgtaatttttttaacaaaaaaagatcgaatttggaatctttttcctttcttttttctttcttagttatttaatcaatcttatatgttggtattgttgttgcagatgaaagtgatgaggtagatgagtctcctattgaacaagtgaggctcaccgttccaacaaccgacgacccaacacaaccagcactgacattcagaacatggactctggggttggcctcatgcattatcctctcctttgtgaaccaattcttcggctacagaaccaaccctctctacatctcctccgtctcagcacagattctctctctcccagttgggaaactcatggcagcaacacttcccaccaaaccaattcgtgttccgttgaccaagtggtctttctccttgaaccctggccccttcaatctgaaggaacatgcactcatcaccatctttgccagcgctggatctagtggtgtttatgccatcaacattgtcactattgttaaggctttctaccacaggaacatccatccacttgccgcttttctcttagcactttccacccaggtcattaccatttcattattatatagtaaacatcaatgatgtgaaaaagagagagtgagaaactcataaatgatgtgacgggagatggtgagagaaatagaagaaagaaaaaaaagtgaaaatgaaacaacaatgctatttagtatgaaaaacaccttaaaaattagattacgaaaagtagggattcataatcatacaaggcggggttgttgtgaaaagattttttaaattatatttatttgaagtctcttcttaactttttcacgaaatatttttcgcactaaagagcattttccaaaatgaaatatacgaatataaaaactggtttttgtttttacttttaaggctattaatcaaaataacaagcatttttcaaaatatggttagtctgctaaaccttgtcgttgaatttttagatgcttggttatggatgggctgggattttcaggaaatgtcttgtagattccccgtacatgtggtggccttcaaaccttgtacaagtgtctctatttaggtatttaaatttaactattctttcttgtttggtgatttttggcgtctttatttttttggatatgtgaatgaaaaggattaattatatgaaacttttaattttggaatattctgtctgtgataatgacagggcatttcatgaaaaggagaaaaggcctaaaggaggaaacacaaggctgcaattctttttcctggtctttgtagcaagctttgcatattacgttattccaggctactttttccaagcaataacaacaatctcctttgtttgcttggtttggaaaaactccatcactgcacaacaaattggttcgggcatgaaaggccttggcattggttcatttggcttggactggaacacggtggctggcttcttggggagtcctttggctgttcctggctttgccatcatcaacattctggttggatttgtgctgtttatgtatgttctggttcccatttcttattggaacaacctatatgatgccaagaagttccccatcatcagttctcacacatttgattcctctggcgcaacatataatgtcactcgggttttgaatgctaaaacttttgacattgatatggacaattataacaattacagcaagctctatctcagtatcacatttgcattcgactatggattgagctttgcaactctgactgctactattgcccatgttgccctcttccatggaaagtaagctttgtttagttagtgatataattttaatatagtaccatggataaaacttagatgatattccatagttgtgttgtttttctaactggatttagagtttcacctcgataatccatgcaataaaagatttcattaaatgttaacatgaattgtagaggtgaaattataattctgattgaaaaataatatctaaaacacctataaaattgtattatctattggtactcatgatactattctccaattcaaaggttggcagtgattcttaagataaaatacaacttggtcaactttgattgcagaacaatatcattcaccagtgtatctaaatttacattcccattttttttatttataataaaccatctaactttatgcttgtggctatctatttgaaagaacgatttatcagatgtggaagaagacaacatctgcactaaaaggacaacaacttggagatgtgcacacgagaattatgaagagaaactatgaacaagtacctgaatggtggtttgttagcattttgcttctaatgattgttgtatctttgataacttgtgaaggctttggcaagcaactccaattgccatggtggggagtcctaatgtctcttgtaattgcgttagttttcactttgccaattggggtcattcaagcaacaacaaacacggtaacgtccaatattgtccaagtagacaaaagtgttttgcatgcaaaatgcaacaatgccttgtttgttttgtatggctttcaaaaggttgtatttttcttgttttgcagcaagtcggactcaacgtgattacagagttaataattgggtacatttacccaggaaggccacttgctaatgtagccttcaagacttatgggtacatcagcatgtcacaagcgctcgggttccttcaagacttcaaattaggccactatatgaaaattcctccaaaatctatgttcgttgtgcaggtaggtataggatatgataggatgtaaatgcatgcacatatggttgatctaaacaactttttttttaatcagtaaatgttagttttattagaatgttacttttattagccgaagacattgaacgcacaatctttgtcatctttcctttctccttaacaaaagtgatcagacaaacaaataaatagttaattttgtgttcagttggtaggtaccatagttgcttcaggtgtgtactttggaacagcatggtggcttctgacaagtattccacacatatgtgatgaaacaaacttgccagctggtagtccatggacatgccctggtgacgaagtgttttacaatgcttcaataatttggggagtagtaggaccacagagaatgtttaccaaggatgggatttaccctgggatgaattggtttttcctcattggcctacttgctcctgttccagtgtggctgcttgctcgcaaattcccaaaccacaagtggattgagctcatcaatatgcccttaatcattgctggtggtggtggcatcccaccagccagatccgtcaactacataacttggggatttgttggaatcttcttcaatttctacgtttacagtaagttcaaggcatggtgggctagatatacttacatcctctcagctgctttggatgctggtgttgctttcatgggtgtcattctgtattttgcccttcaaaattatggtgtttttggtccaatatggtggggtcaagatgctgatgaccactgtcctttggccaaatgccccacagctccaggcgtaattgctcatggatgtcctcttctctgacctctattctctaacctccatcatccattcattcatctaatgtaattataatttaatcttttttttaaaaggtttaattataactctagttatgtatcaatttaatttgctctcatttcattttgttaactgcaaacattttaaacaaatgcagtcattttttttaaaataccactaaattaaatcagttttataaaaataaatggccaaattaaatatattttaaaaaataaaggaaccaaattgaatctaaaaaataaatttcttgattttttttgaaaatttattcacaacaatattagttaatatctattttatgttaaattgtttcatattttttaattgatatataatgaaatagttttgttttccaagaatgaacgacataactaattattatttaaaattattatttttttaattttaaaattccaaattagcttgttactctattcttgtttataaaataagccattaatatttgaaaactgactattttattttatttttaaaattccaaaatactgttatttaaaaattgccaatttttttaattttgaaatttcaactcattactcttttgtattgactttttaaaataaaattctcagtcttcattacactcttttcggggtttttttaaactgccgagttttctttgttttgaattttaatttaaatcaaataattatagaaagtgctcgggttgttgtaaaaaagaaaaagaaaaagaaaactgctcaggttttatttttttcaaaaataactgaattaaaaacaaaagatagcattttttattttaaaaaaaattactgaattataaacaaagcgataacaattttttatttttaaaaaataactaatttagatgagaaaataaaatttgaagtaatagaatgtataataggaacacggtgtattttggtgcaagttaagatatattagttactatgatgttttaacttgagatagtcaaataaggccatcttaaatatatagaaataagagaaagaaggaaaacaaataagagagaaataatgaacattgcatacgaacaaaaaagaaaaatagaaaacttaaattagtaaacataaaatttgttgtactctttatcatagtttttttcaagtcctcacctctatcatgacatatcaccaacatagcttccaagcatataatagaggatgatacatgaccatataatagtcctattatggtgcgttgttttgatcaaagatgtctgctatcatatggtattttgttgtaaacattttttgtactatcagcaagaaattaaggaaagggagttttacagaaagaaaggaggaagagggtgtgagtgagagaagagaacagttccactcaaagaataaaacgtattgtcgtgcgtagtagcagttacaggagagtcttcagaaactgatgggttttttatttgagaattgaaaacttgaaagtcgttggcagaagaatttgtactgaatgttaagccatgatcagcgcaaaacagttgaggacttgaggttgtgtacatgagcaatagaagagaagaatattagctgataatttattgttcaatttaggaacaaaattgactaagaaaagtatcttcttataaattatctattgacatatctatcaacatatatttataaaatttaaactaaatagttaataatatattaaaattcaaataatataaaataattattctttaaattataaaatataaattaaatactcgtacaagacaaaaaaaaataagcgagttgtattgtataaacagaaagttgaacaagcttgtactgattgttttatgttagcagggcaagcaaattgtttgcattatgtatttgtttgacttcgatcattgttgtattctatttctatccaattaaatatgttcaaacccaacaaactcacgatggccacagacatctgaaatagtggaaaccgatttgataaaaacatcctcaccatcattggcattgttgcctagtgctactacttgcatatcacacgcttaccaatcctgctcaaacttgtacgcttcatattgatcagaaaaaggaacattttttttcagaagattaatcataaattcataatcacctcagacaatgatttgggcccgcgtaatcatttataactgtcccccactccctttgtcatgtacagcccaattttattttatcttatgaataaaaacattacaaaacataaatctgaaaagagaatgcgttgcaaccataaaaacataagaaaaccattggattaactaagataatgacagtgatggttttgttgtttctaccaagtaacgaagttcgtcacaactcacaaacaaagcaaacaaaaaaagagtaaaaaaaaaaatccacttaaatatacctacatccaaggggggaataaaagaaagagaggctctgcaatcaaaatcctttacggacgggtggtaaatatcctgcttatacaactgaaaaagtttcatgaagcaactttcctagggtcaaaatatagtccctaaatgtccatcattgagaatccagcatatgcaccataataagcctcaatatcctccacttgcaaagtaaatagcgcaaaaatggagtcaaaagggccgggatcagttaaaaagccctgggtttagccaatccctgaaaacaatagaatatgtattatgtaaagtcttagtcagttatagctgcacagataaataaaatactatggaaagaaagaaatactgcaagcaaaaagcacttacttgcttatgtcatcgagatggtcatcaaaatctacaatgtcattccacttctcggatgcaatatagtccaacaagactagatttgctgatggctctttgagagagaatcgattgttcccatctgactgaaccaacttccagttcttagatgtatccctaacataaagctaaaccataagaaaaaggcaatcttggttaatgtaactaacaaaaaaatgactttatatatgggggaaccgtatattatatatagcataaactctaggaagttggaaccatacttatataacaagcagataatgaatttcttcttttataacaaaaaaaaaagtgtttttgaaagaaccataagatttgtaacactaagaaacaaaagacaaggaatctttgtaattagtacgaattttagatgaagccttatagctttgaggttgtagcctgtataatcatgcaaagtgtgcacgttagacaacattattatttcattctcccactcttggaataggatagatcttagtacatatttggtttagcttattttagagaagtttttttttgtttgtttgtttgctaactttcctgacagaacttttggaaaaaagacaaaaaaaaattatctcccccaaaagagtggctcccaaatatgctgcagtatgtggcaaatcaaacaggaatatgataagcacccaagcacttgggaaccctgccttgaaagctagctgttaaaaggttggcggggggagagaaccaagccacttaagtacttcaccgaatatctcatactacttgaggtgggatttaggtacctcataatatctgagtccctatcagaatattcctctcttatgacttatgagctatgatcaaaacaagagaaattgaagcatgacattaagcctgaaatttgaattctagccatccaagatgatccaagttacaaccaatgaaaccccacatatctaaatcctagccccctatttctagttaagtttttagatacagcagttttgtctaaatttacagaatgatgcaccaaaataagccacaaaaacaagacagtcagaccaaccaacataagcaaactcctaactgtccaatgcaaaagcagcaaactgcagaaaatatacacattctaacgagttcacaggttttcatgatcccattaaaaataagtggttattttagtccactgacaaaagcccttgaggatttctatattcatatagatcagaatggtttctattctatacatttgatggtttgatcaaatgtatcatctaaagaagcccaaatacaattcatggagtggataaacacaatgattattgatcttgatgaaagcggtatccagtactgaaattgctaacctgcattatggcactacggtccttgctctttttcaaagcatcaagcttcttgttatctaactgcgaataattgaataaaaacagaaagacgataaacaaaaggagataattaaaaacaaaattagtaaaaaataaaaataaaaattcaacaacaaaccaatagaacggcggcttggggaaagtagcggcatatgtggtcaccaatattcttcgccacaccaccaagctcactgtcatcagatctctcattcgcgtgaaaatagcccactatgttcaaccctttagcagaaaaatattcctctatctatctcacacaaaattgatttaaaaaaaaaaatcagaaaactacaggcaacacaaagcaaacaaaaaatcaatagatgcccagaagaaaaaaaagataaacccagttgattaggttgcatgttgattaagaaagtatacgtctttgtgcataattttgtaaattacaatatggggtaagaattgaatgtaaaaaaaaatgataaatccctagagaagagagagagggagaaccatgatgagagatatctccaactggggaagaagagggatgtgagagtggaagagaggtacggcatcggcgatctcgacgacgtcgttggaagcggagatgcgaccgatcaagacgccgttgacggcgcaagttggatttttgagtgagtgaaggatgagtttgatgtaagagttttgtgcgatttcgtacctcaaaccgttgctacccatggctaagattctcgacacaaaggtttgaggttcctgttctattctgttctgtcgaacacaaacagatgcagatgcaatcagttgctttttgacaaaaaggagtaaaaaaaaaaaaaaattagcatttgggtatcttttaaatatattatcgaatgggtaagtcttaaatttctgattcagaattcgtttacatcaaactccaccgtaaatatatttaagacttataataataataaaaaattagaaataataaatatatttacgacttaagttgtaaatatatttatatttataataaaaaatttaaagaaatttaaagtctgttataaaaaaatttaatgtcgcaacatcttatacaatttacttccattagataatattttaaaaaaaaatactttcaaatgataattaattttttcaccccttctttatcaaaaagccacaatcagctaccatcaactgttgtgtacttcgcactttgtcaattcccacaattctaacttgtcactcagtaactacagtttgacagtcagtagtttttgggctttagcaattgagtccaattacttcatagctcaacaattattttcgccaattttgtttattatttttaaattatttaataggttaaattttaaattttacgttaaagttaataaccctgcttaatttatgataatattatattatacgtcatatgtgtcctttttctttgtctcacaataataacaaaaacataattatttttttatcaatattactatacaaaactcttttaatcgaatacaagagaaattattattaaaagtattgaaaattattcccctcattttcttaaataaggattgaataaattcattaaaattttggtcattcaggattaatattattctaaaagagaaatctcaatattatgggaacttgagttatactcaataataacgtgtgaatccaacttatacaaataggttagatcactttaaacgcataaaagtcaacagtttctacaaagaagccatcgacttaagggtaactgatatggaagtgtgaccttcataccctacgaattgtgatatttgcataactcgaaccatgatgatcgagtgttcgttctcacctatatcgatctctctcgaggacatcataacccctcctaaagaaacaagtttatcaactaagctaagaagacattcatattgaacgtgagacactcctctttggggcacacatcctatgtgtaatgacaattggataattgatttttcgaccataaacattatataatttagcaaacattggtatgataactaagacaacattccatcttaagtccatattaacttaaacataagagtctatacaagtatccaatgtctagtatgatctcattctcgtcaccatgcttcacaccaaaattaccatcatgatccagtttggatcttttcctaaatataatttctatcatctaaactgaacaaatatattttttcataagaaattggtcataaaaaataatttttatgatttaagaacttttctctttcacaccttaataatgtaaaaatttatgattctcatatatttttctctaattctgatatttgacaagttgattttttagttctagtattgttgcatggcgtttcaagaagccatgttggttagcctgacctcaaaagccatcctgatgattgagatattgttgttactaggtcaacggaactatcccaaaagaaaaatacaaatacattgttaaggagaatgataatactctttatcgtataattaagtgaattatatgtaaattatgtttaataattcaagttcatacgagactcaaaatttttttttttttataaattttattcaaattgaacaataataaaaagataatcaaataatttatattttatatattttaaacatataaataaatattgatgtacataaatgagttatacaataatttagtattaataattttttttctaaatatgattaatgtgaaataaatttttagtcaattttgcgaaaaaattgtacaattttaaattattaaatggtataacaattaatgtatttttataagtataacttaatctcttcatatacatatgaatctaattttgatattctgttaatacaattttttagccaattgattaaaaattatattaaatatgacacctaaattaaataggaagactttaatctttatttattattaatatattttttatataagaaataaaaaataacattttttttaattataagaaacatactattatttcattaattaatgtcaatctaaaaagtgtattgattgttatttttttaatccttaatcttttgtgagattcagtgatatatactcaattctcgtgaaagtgaatatatttattatactattaagaaaataaggtatattaattagtttgaatatttatcatttaaaaaataacaatcacttataagtttatgttatgagtaattttggaataaaattaaaatttataatattattaattaaaatcaacaaatttaatcacttttattgattgatatgatgaattatgctatttgtcttattaaatttttagtaatagatcttaaattgagatcttagaccactttttgatagatcttatagtatcatataagattaaagatctctctaattttttcctgtaatgatagatctcaatttgaaatcttagggagagagaaagagagagaaaatttattattttttgaacaatgtgcagctaagggatattgtacaagaacccattctatatgttcgagatctctcaacttcctttattgggagatctaatcaagatcagatcttaagcttaaatctttgctcaagatctgacactaaatatatttataattattgttcttggttgttttaatcaagaaaaattaataaaaaatattaattttataaaatcaatgttatcatcattaatttatttttcatttttctgactcatatcattaatatcatataaatgaataaataatgaatcttatattgaaaagataaaataattataatatgacggagaaagtattttataggacctactgttctttaagcctaaacaaatataaaatagatgagattttgaagcagttattatttaaatttaaaataaaaaataggcatagtaatggaaatggcgtatattaatgattcaaagtgactgtgttgtgttttggttgtattagtaaaaatatataagtttggggaacagagacagtgtgttctttgtttcttcgttggtgtgttacagaaagatgagcggcggtggtgggtcttcgaattctagggttccgatcccaaacaatgtacgcaaaatcatccaggacatccgtgagattaccggcaagcagcacaccgacgacgaaatctacgccgtcctccgtgaatgttccatggatcccaatgagaccgctcagaagcttctctatttaggtctcttatcttctttgcgatccgtttcttctccctccctctctccctctctcccctacttcccccactttttaagcttcactttcactgtctctgtttgttagggttgttgttcaaacttcacttcatcttttcatgttttattttttaaaatatttattgtaagaagctgaggtgaggggagctgcgtctgtgtgtgtggctctttggacattgaaactttgttcaatgtttgggaacaacaaggagattgtgtatcagtgcgcttcagggagataaaagctagtacctttgtagggttttgtttatgtgactaggaattagctataatagttgaatataataataatctaatgatattgttggtgtttgatggtatcttatctctcaggctctctcgctcacacgtgtttcttaactaatggcttcaacactatataatcatttaggatttcttgaaaagaaatgtgttatggcatatttgagattctctctctctcttttttttttaatgtcgagtgttttttttttgttcacagatacttttcatgaggtgagaaggagacgtgaccgaaagaagggggtaagattctcccgtccctccttacttgctcttgaaagttgagttgctgaatcggattaatttggtgcttcttctgccattgaggggatcaattgtagtggatgaatcttttacctgtttatccactatattgaagtgtatttattattttgattgttgtgagctgctaggcaagctttcattgtgtcatgagttgccattgtgtcatcttatgagcactgtgattggcagactccatgttgagattctataagaatcctttctttttatgaatgtttgaacagttgtggttgttataggtttctacttcctgcctatgatgaagtgtgggatcatgtgatattatttgctgagagtaaaagacttgggtcttgttttataattgcctgtatatgttttttactttttttctgtgttctgtaattgtatatgtccagttataagtaaatgtgcttgcattgtcccatcttttgctccttaatatttttctattagcctgagtattttgtgttatttttattgttgcagggattgagcagcagagcttctgatgagcctaggttaaagcaaggcggacaagggagggggggaaggggtggttctggaggatattcttctaactttcctggtacaatttccccaccttttagaggtttgactttgggctttgttattaacttacttgtctcttccatttatggagtttcgtttccacaaatggttacctggaaaccatcatttccctgtctcttgaaagaagaatacttttggaatgccatatttttttttaaagatattatcactttgtgatcctttcctcccatcaccttcttactgagttattttatctgaatattaagaattatgctttcattttgctgcttaatgagccctattacattccttttgaatccagcatgtcatgataaagtacctttccgttgccactattaatcctttgatgttgttttagttttttctttttttttcattgattatttttataagatgaactgctttagtgcagagacctgtcctaagcatcatcaaattttctactagtttattgacttgtaagttgttaccctgtcttgatgtctgttgttagatggtggtggtgggaggaaccaagctaatcgaagggaaaatggagtcaatcacattgcagagagaagtcatgctccctctactcagccattttcgcagaaaactaagactaatacaatatctcaagctacaaggtagcaatttcgttttatatttgctttaatttgtttatttcaccaaattaattttgattatgagaaaatgtatggcggaaagaaatggcttatttattccttatgtatttaataaaaaagaaatgcaagactccaaaagaagtgaaagaaaggtgaaagatgacatcactcttattttcctgttttgtgcctaaaattctaaccaaatctcacattgaagccatgcttaaaattttatgttgattaaacatcaaattgtactctttttttatttcataacttcaatatctaataataattacaatgaatagaataagtaagaggatactttatttttgattatttattgatgatcaacttgcttgaagtttggcttgcatgatcaacttgataacatcttatatcttatgattgtacacttggattgctaaatacatttatataaagttgtttgttggtgtgatgagaaatacaccagtgtcactattggcttgattacttattcttttttatagttagatatatgtatcctcttcaaaatcatttttcttaaattgcagagtttcagctgttgcaccccatggtgctgcaaatcaatccaatgggaagtcaggtcatgattctgctggccaatctcccatagttagtgttcctaaaagtacttcagctgctaaggacactggccatcaagaaaatgtccaacctcatgcagctgttgttgcagcatcctcctcctctactcaaacctttggctcagttaccagcattgaccaaggaaagtctgtgtcaagttctgatcaacttcaaactgctgtatccgatgtacattcttctttggatcctgtagtagcatcatctgtctcccggagtcttggtgtcagtggtgctattagtagggaagttgggagcaaccgaatatctgccggaccaaatcatgttaaaggaagtaaagttgttcatgaagttaatgattcattggcatccaagaatgaaaaatatgggtccatgaattcaacaagcaaaacaaatgccccacagaagttaaatgaagttgaaaataatcatttatctgaaccctcacaactttcatctccatctccaaatgattcattgaggccatcttccagttctggtagccaatcacctctaggtaaagttttgtttatatctgtttaatcttatgagtaacagggttgctttatgtcctgtttccctcaatgtactgggatgaagtattccttgaattttccaatcaaacaattctaccatatggatactatcattgctctccctactagaaaggaggacaatgtaaattttcagaagagatagtgaagaaaagcccacaggaataggaggacataggtcaggagaagaatcttagaaactatttctgaaggtattttaagtgagaagcagcatgactaagcctataatttaaataagcatgtcacttgtatgggttttgcttttgtgtgctaaccctcaaatttacttgcttagatactcttccatgctcgaaggaatcatcctgacaatctagagttgcctatttatttatttacttacaatttttctctcaattcttttcaagatatctctaattatatcccttataatgccttttggcgtgttcgtacatgtttatgaaacagctaataccacagaggtttcaacttcagaagcttgtgtgcaatcttcagcagagttgaggcaacatgttacttttccaaaccatttccaagtacccaaggctttaaaaagtggtctgacatttggaagctttgatacttttggcccaagtgaaaagtccaacagtggaactggtggtgacaataatgcttctcctgcccttgaattgagtgacgaagctgcaacttcaaggtttgtaattcatctgctccatatgtgcttttgccttgcatatcaaataacagacccctctgtgtgtgtgtgtgtgtgtgtgtgtgtgtgtgtgtgtgtgaacgtgtgttccctcatgccctttttaatggttgtaatatcctagctttgttctcttatatcaaacttcttaacaaaacaactataatctgccagaaagatagtactaggaaagtgggaaggttctctttggagataatactatgccattttccgtgctctttgtcaatcataattcataaggctgagttattatttcttttatgaattattctggctgaattaattgatttttctttgttaccaaagttattacttgtgtcatggtgtgctcatgtaatttttgttttgatggtatttcttgtctgaatatagcaatcaaagtgcatcgttgactgcacaaggagatcatcttgattatccacattcttcatcttatttgattgaaaagacaccagctacaaatggcaatcctataactagtactgacacaaaggttgatcagccaaaggaggttttgttggctcctgaaggccaacaaattccgactgttcaaactgctcaaaactatggtttgaatttcatttcctccatgttaggcactcagcaagttcaatttgagggaactgaacctcagtcacaagatacatctcgccttcctaactttgttgtaagtttctccatcttttacttcttaagatcttcctctgcttaatatttattaaaaccgaatctccctgtgtttgaatgctctcttttccggtttggtgttttgatattggccctttgttttttaaatttctttccattcatgaacttgtaaaaagtaaaaggttaacatttgttttccaaagttaatttactcattcaagtaaaaaggtttccattcataaacttttaaaaaggtttaacatctgtaaaaagtaaattattcttagtatgacttttaaggtagttattataaatgtcaataaatttaccatacatagcagtttgtaattggatgacaatgtaaaattctttgcaagtgcatatattatttattatgactgtatattttttccttttatatgattctattttttttttttttactttgtattgcagaatgcaagttcgcaggctgtgtcccctagcccaactccacccctgcagaattctatacctgtgactccacagtcggtttctattttcaggccaccataccctgctaatttcttcccatatggccactattaccctccaatttatgtgtctccaatacaccaatttttaaaccacaatggtttccctcaacaaccatccgctggcagcatgtatctaccagcagctgctgggatcaaattccctctccctcaattcaaggctggagcaaacacaggaaacacagctcatattggaattccttctggatcatttatcactccacctgtaggatatgcgccaggtcaaacagttaatactggaagctccactggaaatgaagatctggtagtgtctcagttaaaggaaaaccagatctatacgacaggacagctggttggtttacttccttttaatgtcctttatttcacccatgcatatttcttgataaaataggaaattttgttccatattttggtccctggttttcaatagtatcaatcttattttgtcaagagtttatgtttgcttcatcagcatgaaatgaaattcttggactttctggagttcctaagcatattattttttatttttttttgctacagagtgaaggctctgcagtgtggatacctgctccaggccaagacatgtccagtttgcaagttaattctctgtataaccttagccctcagggacaacatctcaccttccccccaacacaggctgctcatggggcatttgctggtatctatcaagcagggcagacaatagcttcaccttcaacccttttgcaacagtctcaggctgtggctgggcccgttgagactgtaggtcccccttcaggatcttatcagcagcctcagcctacacaaatcaattggaactctaatttttaggctggaaaacattttcttggtgcgataatgttcatatgcacacatggtgtgctcagatgcaggaagtatgaacactggcctgatctgaagtgtaaataaaaatgtggccaaagaatgagaaaggaaaattagtaactgtttttggtggggatatttggtgctaacgattttgaagggtgctaattgcaggttttctttttctattttttttattaaatttttgagcctaaagtttatttatccctccctcttttacccgagagaacatttagttgttgctatataagaaacttggtaattcctagtgataatatactaagccaagaattggtaggtgagatataccaatttttccgttctaaattctcacctgtatattacattttgatatcagagaacattgaattatacaattttatttggagcatgaaaattgtgatatctgcttttcttagcacatttctagtctcatctataagcccttcacaagccttacctgattttgcatggaggaaccaacatgcttatggatttattttgtctgattcttttgttttgaaatttttaaattcattttctatccagcatgattctagtttttctttcaacacatccaattattgagaaattactgtttgctacaggtctcgtgtgacagctttcttgaaaccttaatagttcatatgcattaaaaattatcgggaatcatagaattatatgcttctgttctcttcaatgttatttatttatactcttaataatttgggcttaattgtattttcggttcttgtatagttttttaggtgattttggtttttcatattttatttgtaaattttgtttcatttgttaacattcatagatgtggagttggaattctggcataagtttgatgtgggtcttaatttttaattattcgattttagtcttatttttaaattgtgcaatttggtgcctgtattaacttgttatccattatccctcatttagaaaaggcaaaaaaaaaatatgttaatttgcatacttgatcccatgattacgtgagcgtggacaatgataaattatagtctaatgtgtttggtataagttaaaattattaggtttattgaacttttggtttctttattttctcaattttatgaattgcatttttttttttgcaaatttgatttaatattttaattatgtaattttgatctattaattaacttgagtatttaatgataatattgatgtgatattacgatatatgtggatttgttaatgtgacattgttacattagtattttttgttaaatatttagatgttaatagatgaactcttaccaaatcatatatgtttagtaactccaaaaaaatccatatatttaatctagaaaacttcatcttccaattttttttcacgagtgttagatgttaaatatgatatatctaaataatgcgacattatattttcggttggttattagatgttaaattaaaacagtgaagaatcatattcatgtagaaaatttggaaatgaaatttgcgaaatcgagaaactagagacatgaaatgtttaattaggtcgttaaagagagtttgagtaccatggagggtggtgtgtaaggatgcaagttaattatgttgctcacttattaggcagttgtgtaattttacgctagctctcagaatttttattacatacttatttggtgtaattttatgctaaatctcagatgttttattacataacttatttggtgtaattttatgctaaatctcagacttttaatttaatacttgtatttacgacactgttatttcataaatgtaacggctttgtgtttcaaaagaaaaaagagtttgaatacaattaccaacctgacttgtgttatgtagataacaattttctattaatggcaatttttaatgttattttgaaatatgtttatgcttaatattatagataattttgttaattattatttaaatgaattaaaaaaacaaaataaaattatgttaattgaataattaatcaaggaaaaaataatattgatttgaactgttaatattaatttgaattataataatactaagttaccaacattattacttatattatgtatatactttattttaataatttagtcattcaaattttatttttattacaaaattctatagtaatttatcatttgatatatgtatgtcattattaaacaaaatattaatattttaaaattaatatacaaaattttaaaaagtattaaaaaatctccacataatagttttatgatattaatattaatatcaaaataaaattacagctatacacttgagcttttgtgtatttatacaaacatttcttacatttttaatcattacatttacctttcttataaagtgttagtataagatttgaggttacaatgtaacattttcaaacaaagttgttctaccatcaaaaacattatagacggtgtaatgattctactgcttgttcactttgtgaaaatgagttaaaccttcgaaattaacgatttgttacattccctaaataatgaatacaatagcggctaaatttatcgtggaaactcctctgttttttgtggctttccatttgcaagaccatgctcgtttcttttttctaacttaaccagacatgtcatctgttgagtaataagtcattatctcagagtgtgtcagtggtggtcgacgaacttatataagatgtgtgctaaagctaaagcccttgaacatcattcagttgaatagttgataatgcttttttcatttaagaaattgaagagactgatggaactttgtgaaaagcaagctacccttaaaaaatctcaacgaatttccagtactgtctatacataaagtttcgctaattgctaaaaccaaggacgtggtgtatgaaaaatggggtgttcttgttttcatgattcatcatctactatatgacagagacaagggtgctagaggtagtggtagtaatatttacatttgaatctgtagatgtggtgtcttcacttgttgatttcggcttcgatgaaggctcctgaggctcttgcaaattcaatgatgtgtaaactgacatcccagagagagcaacaacagcaccaccaatgctcacaaccccaggatctgagtcaaataatagataccctcccaacagaatcacacatgttttaaactgtcctaagacaacatgggttgtagcagaagtggccctgcaatcatagattcatagtgtgatgttatctaacattaaaagaaaacaacattatatgtcaaaaaatggtgttggaagaggaatgtaatctcagtaccccaatgccaatgcccctgaccactgcaagagaaaaccaaggagagcagataccaaaactgcagttgagttgttcacatcccacttgaaggataggactcctggtggatctatccacggcatcaatgccccgaggaagaaaactgtgatcggggttgtcttccacatcaatctacaatcacaaaagttttaagtaaatagtttaattaagcacttcttgaataaatgttgtatcatgcttatgtataaaatcgaagagaaaccaaggctaaacagtttttatataagttgaaagttattttcataaactatgtcaactgctaatacaaatatttatgttgcaagataagtccaaataagttgcaaataaactcttccaaatgtactctaattaatattacttacgccagagctgtccagttgccttgctgttgtaaagtagaccataaaatcttatttatggcacttgggattatccatgcaattgcaattagagcaccaaataagttgaaccctaaatctgttacagttgcaacagctacacctgctgatacgacagccaaagccaaaacctgcatcattgcaatgacatacatgattagtgcactaaaaacaacgaaagggggttggaatagtcctttttaagatatgtgaaatgctttataaaagagtagaaaagaaaaagaagggaagaggagtaattcctcacctttttaaaatcaatggtttttccaaaaagaatgaactccgcaagaacaatcgttggggtaacagcaatcttagccatttggtagaaaccaacactgcaagagctggattgtcagcaaaaagtaaagttccaaatctttttatcataattcataaagatgctaaagcaagtgaataaacctgttatacttgaggctggtgtttgcaaggccagaggcaaaggccataacaacaccaagtgcaaataaagaagagaatggagttgttttagatggaggggacacaggaagcactgagagtgtcttgaaaatggcaaggagaagccatgcagtgatgtagtgtacaaatgtgaggaaaattggaaagttgaagccaactttacccatcacctgttaacaacataaacatgtaagggtgcttgatcaatcaataggcttgtaatgactagttgggacattcagttcatcacattatataatacatgatagaaaagaagcaaattgtactgaccaatttgtttgccatgataatcccaacagcaaccataaaattgaaggacagtgccaccactggtccacaatatctttgctgttggcgcttggctccttctgaggttcggatctcattgtagagagaagctctgagttcttccagtgctctacctgatatagtttcaatcattagctggagcgtacaccaagtctagtttatattggtattgggaacaaggatattggaatcaatggtaatgactaatgagtaatatcttataatcatttcattgcaaaagggaaaattgtaaacattgaatatgtccccaatattactccagggcacaaaattagcttgtgtataaagttaaaatcaacttttgaaaaaactaatactttttacatataagttaatggagaaacttgttttatttcttttattttattttttctcctacaaatacttatgagaattttgcctaaagaagactcaaataaattgagttctaatcagctgtggaaataaaagaagtgcattatagttcaacacttaacagaaaaagaagaatggagcataagggcagatgccaaagaaggaagaatgaaaacaagatgaatattagatcaaattcatatacattcatttcaagtgtcatttcttttaattggccactgagaacatcaatgaaagttgcagaaaaataaacagagaagtatcagttcaattcaaaatcaaaatgggtctcagaaagtttctaggatccgtaaaaccataacataaacaacagagattatgaatgtaaaaagagagagagagtaacgtaacaaacttataatttacaaccgccaaggccggagtatccaatgattcttaaacgataaatagtatttcacacagaatgagcagggaaaaataattattaatgtaagattaagatagttgggatctattcatcaagagttgaacatgaaaagttcacaagccaatcccagaaaaagaaaaaaaaaacaatatatgaacataggtaaaaacaaaagttgaatgtacattatgcaaattagatataaaaccactcagttgcatgaaataaaactgagtcacaatgaaatcagctaagaaattcagaaagacctgcatcgccagcatcactgtctttccttttaataaactttcgtcctcttccccacagtgaatccaaccaccccataacaatctggcctattcatggacttggatcacatatttattcaagatgctagacactctttctaaaacactattctataccaattagattaaagaagccaaaacagaaaggcaaagagaaaaaagggttatataaatatgaattaataggccatgttgcttaaaatacaatcaatgtatgttaggtgcttatggggaaacagaaaattgacattcttcaaggaggggtttttcaattgcatgaaaataaaaaaaataaaaaaataaaaaaagacaaaagagaaaagtgaagggaatttactgtgttccaagagaatttagcatttgatgagagtgccaacaatttggcaacacgtgtttctcaattcaagcctactagaagtgtagctgaagaaggtactactagcatgcaacacctgtctatgatatctggtatactaggaattgatgtaactgttgatttacgggaagttaatgtaacatcatgaattattgttatatcattaggaaatagtcaagacacttgtagcaacgaccgctatgcactcttttagtttaggtaagattgcctaatctcatggatacaacgtcatttctgataaggtatatatcatcactaaacttgatgcaaaagttccatcttactctaactgatccaaatgcagatttgaagatatcctaccaactggttggtaccattaaccgttaaagtgatgcaaactttttttttttttctcttttgtagattaaactagtattttagtccatatattatatgggataaatgttttttttatttaattaaatctttaaaaaatgattagttttgaaaatataaattatattataattagaatttatagtaaataaatattgtttactatataaattatagtttgtatttatgataaacatttatattgtaatataagattattttgaattatttataatttaatttcttttgaaagttataaattttaatttaaaataaagatagaaaataaattaaaagagataaatgattaataaaacatggataaatataaaaagagagtgttttgagatggttggcttaatatcttgtgaaaacaaattcttttttgaccatcttaaatcaatttcattttatctttatacatataattgacttttcttaatcatttttctctttcaatttatattattatctttatttctaaattgaattacaatttttaaaagaaattatcagaagttaaaagtaatcttgtatcatcatataattgtttatcatataaatctaaaatataacttatttattaaatatatttatttagtatgatttgaattacaatataatttatatattttaaaatgtttattttttgtaaattttacacacacaaatttatgatataagaatatactaacaagtttagtgtaatttagattttatttgctacatttggattgatggtatagatagccatcagggttaggttgaattcctgaaatagggaccaaaatctctcatggacatggacagttatatcttattgtgattcagtggcaaggtcattttactcctaacaagaaatgattcactattcatgagtataaattactttcccattactaacatttgtaatttcatactgtcccatgaaaaaaatatttacgaattggactcaaactacttcgtaacacctttaatttaaattacaatttttttctttccattcaaaagttacactctctttggttgaattgaaaagagaggagacaaagaaacaataaattttttgttgagaccaccaaaaatttgttttgcccaaattagagaaagaaaaggcgaaagtaatctttatattataaaaggactaaaatgatattttatttatttatttgtcatggttctctctctttttaggttattcatgtcactttagatacaacttttttttcttaacacatataaaactttcttttcattttctttcttattaaacaactaaaatatcatctaactttaaaacaaaaaaatcattctcatttttttattttattttctaaactaaactaagtattgatgtctttacgttatacattcattttccgagggtggggacaggacagggtgcaaattatacaatttaggtatccaatttatactttcaattaataagtccatggattcgtgttgtgtgtgagagtcagctggtagttttcattccgttgttcatttgaaaggttaaggatggtgtgttgagtctttgctgaatttttttattgacaaagggagtccacatgccccaagtttccttcaagtatatattgctccccaaaaatgtaaaaggatcaattagtattgctaaccttttctcaaatacacttgaagtttatagtaggtacattagtgatggtatgatcatatttttaatatagtcaaatattttctctagtttcatataagtaaaaatgttacttggtatcttagactcaactataagcaaatctgattataagtaaaaatgttattttttatatcaagttctaatgaagaatattttaaaaataactttattttttatttgagattaataaaattaaatgattttaattatttttttaatcaatatgaaagtagttgtttttacttatatacgaaattagaggaaatataaattaaggataatagttacagtcttacagaagtaataataatttttttattagagatgagatgtgttaaaaaaattacgataaaatgggttactagtaaatttttccttttaaatttcttcaacgtcaaagtgaatattgtggcatgactgcatgaagggtgacccatgaaatgaaaaaaccaaatcaagacagaaaacacagattttgggcccaacacaaccgctctgctatactatgactgctaacaaattagtttgattaatgctacttgcttcactgtactatcagttagatacatattctttttcagtttttctattcctatcatatcttacatattttcatttatatatatatatatatatatatatatatatatatatttctttttgaatcttctgagaattgattgataatatattaatatgaaatgcctttaataaacatccatggctgttaattctctcaacagtgcattaaagttaatattatctaaaattaagaatagttttatcatctattgattgttaaaaaagtcaataaatcatagactttctacaaaatgacgacaccaaaaatgtatttgtaacatttaatgttacattcttaatatttttttaatttctaattaaatgttaaatgttaaatttttaatttctaattaaattatgccttgaagtaatggttaacgaaatcaaacttagaatgtttagaaatataatattaaattgtttgcatcaataacaagacaatgaccatgattaattcagacaatattatcacatattactcaaccaaacattaatgagcataattaaaaaacagtagattgaacttaaaacaaggtgtctacaaattatacccgtgactccggttgaccatcccacaacactaaaagagtcgtcaaatagatttactgatttacacatcagtgttttgtgagtaaaaagtatacatgacaaatattagatggtcttcaaagcaccaaacacttgaaaaagagaagtgaatctacaaaatggcattgccgttacggacatgactgttatcaatcacataatttagcctattattcattgtaaatgaactatttttattttttttaatgagacgaattgcatcaatttgatagacacgagattaaagacatgcagcgtgtattccattaatggtcaattacttaccaagccaatttattcatgttcttgacatgttcttatgacaaatgataatggttaaattgaaaggatatgtgggaataacatccatgcctttcatggaccaagaacttgtcatgaaaagtacgtggcccaccaactaaaattctgcctcaatatataggcaaggtcttggtctgatgcagttgactcacgatatatctaattaaactacattattagactacctggcttcaacaaagttctcatagaatccaagatcatggagaaggaaagagaagatgagattgaggacatgtcaatgtcacctccatctattggctccatgcagattgcagggagcaatggctttggtcacagcatggagttcatgtctcaggcataccttccaaatatgtacacagagattgacataaaagttgaggatttcagtttcgaccaagatccccccctccccatttatctcaaggtagagaaaaatggctaaattctacaactttattagaattttctttccacgtgcattaggagaaattatagtatggttcaggaccaccacatatagatggtttcggccaattttcatgtggcatgtaatcgagtttttcaatttacaagagttaagaaaattcggttacgtgtggtacatagaaatcggccagaaccatggacttgtgatggtcatggaccatatgttattttcttcgattgcattagagcaaagtttttctttttatgagaatcatagttcttcatgcaatgctattgaggatcttgatgattaccacttgatattgaaaattgatttcaataagaatattctcatcaacagtgttttaattgtgtatttatgattactgtcatttgctctcaaaattctcattaatgtgcagtttgaagatgtagagttcaaggtgagggatagccaagcggcttccaagaaccctgtgaagacaatgatgtcaaaagtaggcacacaacaccacgtggaggaagatagatacaagaaaattttgaagagtatcacaggaagcattggccctggtgaaattcttgctttgatgggtccttctggtagtgggaaaacaaccttgttgagagttataggtggaagattaattgacaatgtgcaggggaagataacttataatgatgttcgatttaatccagctgtcaagaggaggttagaaagcttcatagacatcagcatccatgtcatgacatgtgcttttatattttaacagaacataagcactcttctgtttgttttgttttattttcttctttttctgacttataggattggatttgtgacacaagaggatgtgcttttcccacaacttacagtagaggaaacattaatcttctctgcattcttaagactgccaagcaatatgagcaagcaacaaaaatatgctagagtggagaacactgtcaaggatcttggccttgaaaggtgtgttacattaattgattctttgaatcctccacaattgactaaaaattagttattatgatttcgagtaagccgcaagcaaagaaagaaataaaactgcttccctaaataatctcttatataaacatagatgccgccacacaaaaataggtggaggatatctgaaaggcatatctggaggagaaaggaagcgaaccaacataggctatgaaatccttgttgatccttcactgctgctacttgatgaaccaacttcgggccttgattccacctcagcaaacagactccttctaactcttcaggggcttgccaaggtatcagtaactatatttaactgtcattttgataacatgcttcatttctataaccccacaatttacttttgatttgcctaaagggtggaaggaccataatcacaacaattcaccagccatccagcagaatctttcacatgtttgacaaacttcttctgatatcagaaggctatcccatttactacgggaaggctaaggactcaatgcagtacttttcatccttgaggttcatcccggaaataccaatgaatcctgcagagttcttgcttgacttggcaactggacaagtgaataacataagcgttccacaagatattttgaaagatcaagaatctgctgactcttcaaaagctgttattaacgttagatttatgtattatataagtcttatatgcttgttctatctcaattctatttaataattgatcctttattttatgttagtatctacaactcaagtacaaagacacactggagccaaaagaaaaagaagagaatcatggagcagcaaacacaccagaacatcttcagctagccattcaggttaaaagggactggacagtgagttggtgcgaccaattctttattctttataagagaacattcaaagcaagaagcaaggactattttgataaattaagactagttcaagcacttggcattgcacttttgttgggattactttggtggaaatcttctaccaatacagaggctcaagttagagatcaggtagtttccatgatattgatttcaattttttcaaggctgagctgctctacctgtctcttcaacattaacattagaatgaactactatttttggtgcaggttggtttaatgttctatatatgtatattctggacatcttcatgtatttttggagcagtctatgtctttccatttgaaaaggcctacttggtgaaagaaagaaaagcagacatgtatagactgagtgtgtactatgcaagcagcactctgtgtgacatggtggcacatgttttctaccctacttttttcatgttaatcttgtacttcatggccggatttaagagcactgttgcttgcttcttcctgactttgttcgcggtgcttttaatagctataacaagtcaagtaagctatgttgagactcataataagtaaacgacgtgttatcatttttgtttgaagctttaatgaatacaatgttgttaatagggggcaggagaactatttggagctgcagttatgagcattcaaagagcagggatggttgcttctttgatactaatgttattccttctcacaggtggctactatgtccaggtatgtatgctatgcacaaggagtagcaacattgtaatttgtatgcttaactgcaactttgtctccctactttctcaatttcacgaattttgcctctcaaatcttttttttttctcgtgaatttaatccctactattttagttgtacaattttggttcatatgttaatgcattgtcacgtcagcacatccatgccttaacacacataaaccaataattagtttgttttggaagtgacatattcatgcatgatcatttggtaagagttgtactcattttttattcaaaagctagccttccttcacagaacgcttgattgtgttgcatgcagcacgtaccgaagatgatgcattggttgaagtatttgtcgttcgtgtactatgggttcagactacttctaaaagtgcagtattcaggagagcaaccatatgagtgtgaaagcgaaggagggtgcaggacactgcagagttcaccatcatttgacactgtagacttggaaggaggcttaactgaagcatgggttctggtagccatggctctatgcttccgcgtgttagcttacttctgtctccgcagaagaattgacatttgcaattagcctctcatgaaatgaacaacatgtcttctatgctgttgttaactaaacagcaacatttgagaaaaaaagtgtctctgctggtgtctactgtctagttgccttttcaggataaacagttgctgaaaaaacacaatgcaagaaaaaataaatactgtattcaagctctaccaagtaccaaccattttaaagaaatgtgcttcataacagagttatgtttttttacggcttgatgtttcaatctacaaatgaaattaatgttttttttttgtttttttttcatttcttcttttgtaacatagattagttgacccatataccataaagaaaagtaaaaataaaattttgatctcttattaacatattttatttcagtttggtctcttaaatttagaaagctatcactttaatttcttaaaatgtctatgttaaactgaattgaccattttattagtttctcatactaatttattaacttagtaatacgtggcaaacggtgaaaaatgtcatattatataaatgtatgtcatatcaaccaaaattgacatattagtgacaaaaactaaggagcaatttgttctaacaaacattttaaaggaaataaaataaaattttaaactttcgcaaccaaattaaacaaaatgtagataagaaactaaaaatttattttaaaaagaaaaaaagtagctgccccatactttaacaaccttttagttaaaatacattttatttgatcattatgctacattaaatattttaattcttcttccccttccgttaaattagataatttttcacattttactatagaagatattagaaaaatgatcaaatccataggttgattccaccccaaaaattatattttgattgcgcataaactatatcaattataattaaaaaaattagataatcctagtcattcatgacattattgctacaatctttgttatagaattggacataaagttttcacctaatattacgactcttttaaagccttaaaaaaaatctaatgattggatcaattatttatcccttgatatatttgtaagatagataagattcaattttataaattagttatggattagacccattgaattttgtctcttctaatatttttttaaaataaatacatcttaatatttatttaaataaataaataataaaagtacctattgatctcatccttaaaaaaaataaattttaaatttattgagttataattcaattcttccataaaactctcttttaaaattatcaataatttccttatcattttcgattaaaagaaaagaattacatgttaattttttacttaaacaaaagaaaaaaatatacactttacagtattgttcgtgagtagagtaatttaaagatataagataaaactgttagtgattacttaattaattaatggcttacgaaatctcatactaatttagttatgatgaagattgggatgacttgcgggcacgtgaagaatgcaatgccgcaatggaacataagacaagacacgaacgaagccaagtaccagttcttcctctctttttttttttccaatcttttcacttcatattcatagttcgtactattacttcctgtcagtttaaaaagctgcagtgttcacttttttaccacaaaacttggaaatcaaatgatactactattactgtatctctttcttttattagccattcaatccttactgacagacacaacatccttagccagcacacacataacataacacattcattcactaacattatttgcacttcactactatttctgttctgttcttagatggaccttgtcccttactctgaccctaactctgccaccaccaccccaccgtggcacgacatgttccgatccgcatccctccgaaaacccacctccgatcctcctcctcctccgccgccgccgtcaaatgccgaccaaaaagtcaacccctccggcgactctcagtctcaagcgcgcctggccctctacatagccatggcccacgccgggctcgccatggccattctgatcctcttctctctctacaaactcctccaacagtacctcaaaccctttcaatgggctgttctctgttccatccctctcagactcattcaccaaaccaccgtttgcttttggtctcaccctctcaatctaggcctccttcacaccctcctcgcccttcccctcaccgtcttcacgctcttcattacaacccttgttgagattcgtgaagcttctctcagaacccttctcaggaagccaaagcctgagaatgagaatgacaacacaaagaagcgtagcggcttttccaccgtgcttcgtttgctcttgtcctttggggtgtttgttgctgcttatgagaggcttggtgctgttgggtctctgtcacttctaggattaggctttgttttcagttccaagaacgtggatttcagtttctcacttttctttccctctggtgcatttttcacaagaggggtattgaagaggttgaaaaccgttgtggctgttgggttgattgttggcatgattgttgggttcttgagtggggttatattcttctcttacaagattggcggcgaagggaaagaggcagtgatttcgctgaaggttcgagtggaagagaacaattacgctgagagaatcggtgtgaagaagtggatggaggagaatgatgttgctgggatggtggataagtacactagtcagttctatgagacggtttctgatcagattgatgggttggcaatgcagtacaatctgactgaatttgtgacggttattaagcagtttgtgataactgctcctgctagtgctagtgctaactcttcttcaacggattcgttaatggtgccttcaccatacacagaaaagctcttgagtttgaagggtagggttaggaataaggagtggggggagatttatgcagaacttgatacccttttccaagaccttataattactaggggggatttggttgagaaggcaaaagggtatgcggttaaagggatggatgttggtcagcgtgttttggctagtggtacaagtgtgcttggaagtggtgcaaagtttgtgatctccattttgaattccatagtctctggtgctgcggaggttttcaattttgtgtctcaggcaatggtgtttttctgggttttgtattatctcatcacatcagagtcaggtggggcaacagaacaagtgatgaacatggttccgatgtcaaactcggccagggtcaggtgtgttgaagtgttggataaggctatttcaggagtccttttggccactgctgagattgcattcttccaaggatgcctgacttggcttttgtttaggctatacagaatacatttcttatatgtgtcaactgtcattgccttccttagccctttgctaccaatatttccatcttggcttgcaacaattccagcaacactacagctggtactagaaggcagatacatagtggccattttcttgtctgttgctcaccttttcctcatggattatggggcaactgagattctggaagatgtgcctggacacagtgcatatcttactggactgagcatcattgggggaatggctttgtttccatcagctctagaggtaaattgttacccctccatgttttgatattctgatatttttctttagtgtttaatttttatgcactctcatagaggtatgactttattgtaaaaaaaattaataaacttatttatcatatatgacaatgtaaaaaccctttatactaccagtgtacatagactatttactcttttcttactcaatttgaactagtaatagtcttacattgtcattttttagattaacatgaaatttccaacctatatttgttctagaatttagactggtttgcctgcacaacttcgtttgaaatggttatctgcttgtgtaacttttgtgtgtgagcatgtgggatccaatgtataggtgtagtagctcaagtgtgggtcggcttattagtgaacttgtatggatgcattttcctcgtatttcataacatttgctgaaggattctgttgttccacagggagctattttggggccattgataactacagtcatgattgctctgaaggatttatatgctgaatttgttttgggcaaacctgatgacaaggtaaaggagaaggcaaattaggtttctatttgtgtctatgactgtatatttttgcggttgaagatgtctggtagagtgctagtacattgttctttgccattctagcagtggagcctgtctaggccgtcatttgtttgtacttattcttttcatctatatcatttgattattgtgattgataacataggagtttgttttcctagaactgaaattaagaaaaatcaaagtatactttggacaaaaactatttttgtctaattattaagagctactattactgtcagacataaagtctaactgttcatactttttcaataactgttcatactttttcaatggacctaagaaaatatgcacataagtacacaaagtttacgttggatcagatattcacaattcacatgtttaaaatgtccagaataattatttttaagttttttttgcatgcaggaaaaaatgtttgtttttacataaatatagtttaattttgatacattttagtaaaaaaaattacaaatttaaatgattaggtttgttgtaactaaattagttactacatttgactttgttgtaattccaataaatgatgatataaatgtagcaatcagtgaggacataattacaaataaggattaaattgattttgtttttgcataatggctaaattgaatttaaaattgatatttatccatgtgttgtgcgggttaaaaatatacgctacaattctaaaaaattagggattacgtaaataggatatttaaacatgttttcatttaaaacaatataatataaaattttaatatataagtaggatatatgttataatttatacatgctataaatatgatatattttgtaagtgccacgtgaggtgtaaataattaagcattatcctgaatcgaaagagcagagcacaagaaacacatgggatgggagtgaggagtctaaataacactcacggaatttttaaatggaattttgtaacaagcaacatgtgtgtcaagaacttaatatcacgcatgtatatgtatgtacatcccatggcctgcgtagacccaccaagttccttttagaacaaaaccttaagtcctattacagtattatttgatgtattatgcagaaactttcggttgaagttatttctgatttcttttgttatctccaagagcttaattggttcttaaagatcacttcatgatcctacctaagggacacaatatgatagaactttcaaaaatcttattaaaaatatatggaaaaggggagaataaattatatttctattatataaaaattgaaaatagataaatcaatataattattgtagtcaattttgttgcagaccagttgttgtaattcgttgatcattaacttgaatatcagtttgaaaaagaagttcaaatgtaatctattgtgcacaatattatgatagacgaagtcggtaattaagacccccgctagcaacaacttttttttatccttactgtttaacgatgatacacttaattgacaagagaaaacaaattcgtgctgtataattatatgccttgaaatcggaagctgcatgtatgtgactgacttttactcaattatattgaatatttgtatgcgcgtacaaatctaacctatccaactcaagcaattgtttagttactatacagaatgtgacatgcaccttttattggagaaccatccaaatgtactactgttcgaagttggtcaaagtcaaatagtttttaatcaagatgttggagttttgtaatttttacaataattattgtaaaagtaaattctaatataatttgtgattgatgcacagcatatggtaaatttggtttagaagttttgtgaatttatagttggtacgaggacaaccggggcaagcacatgaaattttgaggatgattttgcatacttttctaattaacgtaatcaacctttttgcttcaactttgaagccttttgatttctccgtgtatatatgaagataagtttcgtgttcaaattcaagagttcccatttcttatccattttccgaaagtgattgctttcctttgcaagatacgtcaacactaacacgttgcatgtctcaccgcccaaattggggtcaaatttgatcctaatacgtcaaaacaaacttaatcgacgtcttttatttgttaattatatgttttctttggaatatagccacttcagcaacacttgccaaattcttaatggttaacgcatggtttaattttattcattcaagtaaccttaattaacacgctgattaaacatctcgctcattccttatagattccctctctgatttccttttatgtagtagctcttcagcatttagtcgtgagggttaaggccacttattttatgttgattttaaacttgacgcgaccttttttcttttttaaaaattaaaaattaatattgatcccaaaatgatttttctctgatctatttagaactaaggatcatataaaatgtatatttgaaatttttacactttgctccattcgtaaattaacaacgcatgaatttgacctttagccgtcaaatttttggcctctaatttaggctttcccacgtttgatttggatttatggtaaccaaatagaaaattaggtataatcgatagtttgggtcgacaattctacgttttcatttcttttttccttttaattttccacccatatactttaattttccttttaagggccaaggtgtgcgttgcaatgttaatattttagtggtctgatcaatgatcaattctacgttgcagtgttttttttttgtaacaaaaaaaaacatgtaaccaaaaaaatctctgtttttttttaaagtaattttaatctctttaattagtttatgctttttgaatgactaaaacaaatggagactaacactagctctacatcaagtgcatgtatgcaccaaaatgaccacatacgaagaaatagaaaaatcaatagaaaaaattaatttaagatgttcaatgcataggtctatatctagtttccaataattgcttagcaatatgatcaaattttgtttttacttctgctagccctactttctcctacattaatcagcggatggtgacccattcggcttgcgtgatcccacaagttaattttgattctagaatattagttatggcctaatacgactataatttatgagtcaaactaacgactatagaaatcatcgcaactgatgttctgttagccaaacacatttttgacagacctataatattagtaaaaataaacttattcactgtagcaaaataatattgtattcatacaactctacattcaatcatctttagaaaccatctagcggttccttattttcatctgaaaaaaaatatcggtggcgctgtttaaacttaggttaggccacctatgaggtcagtggcggaatcaggaaaaaagtgatagagaggcaaaaatttaacacataaattgacaatgattcatagaaaaaaaaattctcaaaattaaattattttatctatcaaattaagagtaatttaaaatgtaataaaaaaaattaatttaaaacctactaaataaatgataaagcatattcgaaaataattaacatagttgaacctgtaccaaaaaatcaatgtaattaaaagcaattaatctataatagctaaaattatttatagcatatgaaataattaattagttaatatttgaaatcaaattttattattttaatttatacgcgtgttgactagataatactggaatctttggaaaataagatacagatattaccaagaacttctggtagaaatataaaactataaactgatcatcaacgtaaaaaagaagaaatagtaaaattcatcgagagggaggggggtcaatattagaattcatggggatgggtgacagtaaattttatttactcggagggtgactgtccctatagcgaagaacctagtttcgctcctgtatgagtctatacaattacaaaagatttaatcttactcttaattaaccgaacttcaaagatttttcttcaattagaacaatttacaacatgtaataaaaagaagaaacttagttgtgtggttaatacgtaaaacatagcaattattcctagacacaaggagggccacactactccaatgtgacacaaattaactgttggttggattaggtggccaaccgtttaccacataatcccaaaatatcaactgtacccgccagaattcaaatcatgttttatgattcatttatcatataaagaattaaaagattgaaattttgttggccataatgtaaacaaatgcccagcgtatagtatcagataataacttttaagtcttagcccactttatttcagagagagatagacttcactttattttcaccaaaaaaataaaataaaaatctgcgtttgtgataatcttttaatatataaagagacaaacaaacaatgttaaaataacttttgggtccctcgttttatttttttagattcaagttaaaatttcagtcaattaacaaaatattggcaagaagacgaaaaaatggacattaaacttatgggaacaaaacaaaaacaaaaaataagattacggatcaaaatattttagccgacaaagaaagggagagaaaagaagggaaattgaagtccaattgctttctgagcttggcttcatataaaaataaagcctagaggaagttggccaacggttaagttccctccaaaccttgtgattcccttcgaatcaaagcaaaacttagcagttcgattctttgtcaccctctgagacacaacctcaccttcctgacatatccttcacaccaatcttcccttcctcctcttctatatacacttcatcagctccatcccctcttcatatttttcctattcttaacctttctctacagtttgtggttgctgaaaggatcatgttattgaagctttttgtgatatttgtctgattatgttgctaggagttaaaggtggtgcagacccagaaaagatcttccaatcaaggtactagttccatccatcaacaaagttgccaattgggatgcttcaatttcaaggttcttttgatgaaaacctgtgcttttaagaaattaatactgctgctggattcaattacttgatctctgatacacgtcttggacaaattctcaacacacacaggcaaaagaaaacatttccaatgaattctaggtgcttccttgttcatccacaacaagagtatagcatggttccattttcttcaaattctgcctcagaagatagagtggctagtgctcgaaacaggcctccacgtgtcacccctccttcctttatggttcggatggccatgagaatatctagagccagatggtttgcctttttgagaagagtttttcattaccaaaatggatcaaggtccaaccttggctccaaccctttcaattctagcacttggatgatgctggagtttattgccttgattctccaaataacgattacaacgttcactttggctatttccaagagggagagacctatttggcctatgaggatttggatttctggttatgatattggctgtgttcttaatctgcttctactttatggacgctaccgtcaaatttatctaactcaaggagattctctcagcctttctgatatggaacagcagagaaacaatgaagaaaccaggtatcctgtgcacttcaaccttcaacaattttatttcagacaattttattattaggaatgggtaattaattgtacttattggctatattatagtgtactaatgcatgagtatgctctaaaatttgctagaaaagcttgataccatcgttttgttggttaaatataactgttatataaaaataaattgttctccttgaattgattataaataatatttggacaaaacaagttggattgttagaagataggaaaataccaagtgtcaagtaatcataaagttatcataattttaatttatccccttaaaaagagcttggaggaatcaaataccctcacatacctttttcactgcgatcagttcgtggcatttacttttgaaagagtagaatcttttgtttattgcattttttttttatctcgttgaggatataaatcatgtgaaaattgaaaagactaatatagaagttttaccaacttctttttctattaaaatgtattgtaatttcaagttgacgaaaaccatatccaagaattaacagtaccaattaggaattaaaaaataaattgtaaactctatttgtattatattgtctgaaataactttcatataagacctgtttggatacaagtcagaagtgcttttgagagtttccctactgaaaataaatgttggagaagtcattgactcaatcagagaaacaattttttgttattatttttagagccatgcaacttttttttggttgaaatttgaagttgtaattttaatttgcactgtattgtacaggatgtcacacttgatgaataaatgccggacttcacttgagcttttcttcgccatatggtttgtgatgggaaatgtttgggtttttgactcacgttttggatcttttcatcatgctccaaagctccatgtgctctgcatcattctccttgcttggaatgcaatgtgctactctttccctttcctactgtttgtgttgttatgctgctgtgtgccactaattagcaccctcctcggctacaacatgaacatggcctcttccaataaaggagcttctgatgatcaaatttcacaacttccaagttggagacataaagaagccggtgtagagttagagcttggcaatggctctgaaggcagtaaacaattgatcaatgaagacccagtaagtggtaccattagtagatatagactaggccttatttggatagttttttctacaagcacttttactagaagaaaatagaaagataaaataaattaaacgtctcctataaattaaaatgaacttatgcacttcatgtgtttcatggagaaatgtatcaaaatagagctcaagtaatgcaaccctaaaagctaaatgagacaaaaatgacaagtgtgttgtttactagcccttgacttgatgtacagctagctagccacttaacagctagtaatgtagttgggcatttttaccctcgatttggatgtatgcttttaagttccattcattttaagatttgtcatatttcaatttctattgaattgatagatttgttatgttctgatgtgcttacaggaatgctgtatctgcttagccaagtacaaagacaaagaggaagttagacaattgccctgttcccatatgttccacctaaaatgtgtggatcaatggctaaaaattacatcatgttgccctctttgcaaacaaggattagagaggtagaaatagcagaaacaacagtcaaaaggattgatcttatttggtcacatgtatactcttgatattaccctcagttttttcttcttcttttccttaaattttggtttaatatactttacacgtgtcacttgagtgagtttgtatatgtacagagtagctcaccagtgaccaaaactataatgtgtacttggttgtaaggaatggatcccataaccattcaaattagtgatttttcttgtattgtcatctaaatactgtgagataagcatctgcatctctgtagggaaaaaattaaagcaagtaatatattcgttccttaattcttaaacaataaaatgtccattatttagggtttttccccctaaacaaattgccaaaaaaaaaaaaaaatgtccactctttagtatagtctttgtacacatgctacttttcggccttctaccagaatattttgattgccattgatgtaggctgtgttgatatcgaatgaacagatatgatttattttgcatatctaatattaaaattcacaactaaataaaaccaactactaaataaatttatccaagtattgttattcttgtcctaaaatagcctaaaagttgtcaaaccaacccaaaaaaagcacaataatatgaagcaacaagcaacaagaaggcattatcgctgtaaaattagcttaagattgtcaacgtgacaataaagaatcaaaatggtgaaaaataaagaatatccaaaagaagtacagcgtcacggaagctgttaaattattgccaatttgtcaatcatatcaaggaaaagacctatcatagtcatagtatctcatgtccaactaggttgagaagaaaaaacgccagcagagctttttgagaacttgtcgccataaattgttgattgaataaataccacatatttgaaacaacgaaactgagatggttaacgcccaagatttgtgctatctaagagctgaggttttctgaatcttcagaggaagcataatatcatactaggggccctccctctctacattgttgcagagaatccaaagcctcaagtgaaccaagcaattcatctgcggaaggacatcatattttgtacacgccttctcaactatctaggtataaattaatcacttatattgtatatggcttcaccctacaatcaacatttacaaagtatacatacatgattcatagagggaaaccaatcaagcatcttgtcatgaaacatgatttaatgttgttgttatgtcattagcattatgcatgtaccatgtctttaattcgtgatatcttgcttcataagcaaatcatatagtagtattatatagcacacatccaaagaaaatcataacacaacaaggaaattaagataagcgcatcacaaggtaactaactctcttctttgatctccatcatatgcatatatgtccttagacacaaggcataggacattattagcagttaacacattttttaagaatctaacacatgcagctgttatgtaaagtccaaccgtgcaattatctgttttaccaatgtctttagatgatgattggcatgtttatgattctgttttacctgctgttatggcagatgtaagctcgactgtgttcccttgtggtttttaagctagtttcttggagctgattgccccagtcattcacccaaaaaaaaaaaaaaatgtaaagtccaaccacatgcagttatcttgttaaattgtttagttgttgatttgctcaaatgttagatggttaattcttaattgaatatgcgtggtcaggaaagggatggagggaaatatggagaaaaagtccccttgcatgaatctaatgaagctgaatggtaaagaaataaaaatacctggtttgaatatggattagatcaataagcagtcaaatatggttgtgtctgtgtcaccaacacctcaagctgcatctgcattgaagaagtcttcgagtgaaaggaggaattgtctatgctcacccaccacacatgttggatccttcaggtgccggcaccaccgttgaggaatgagccatgccagctctgttggctccaatctctctgcaatgaactctaaccactcactcaaatctcaatactagccttgcctggcttctgtgcttgaatatgttgtgaatattgcaaagtttcaatggaaagaactctcatgttaactaacttacgtgtagtaaaataagttttttaataacaaaaatattattttaattaatttttttgtgggataagtttttacttgatttatctcttttactctgccaaactttattattatttttttgtctttaacgttcaattagtctaaaagagattttgactaatctgaaattcaataaaaaataagtattttaatcaaggattaaactctgatactatacaaataatttgacattatttttaatatattaaccacttttatttattttttcctattggaaagttggatacggagatcatggcatggccttgtctaaaattattggggcctaagaaaaacttcttaaaaagagttcaataatcaattattaattatattaatttattttatataatatgttaactgttaaattttatggatttttataaataataataataaaaatattatgtcatctttttttttaatcattccgcataataaaataggcaaccaaactagcagaatataaacatacagtaaagcatctgccaagagaagcatttgaacatcagaaagactgctccaaaactggaacatgttgagacgaagacgctccacgtttagctaactagtaaagtattcgtgtggacatactcttaagtcataaaatctaatgtataatataattatatatacttaattgtatccgttaaatatataatataattgtatatatattcatttgtaactttttagaacttaataaataaaaacaaaaactaataaatgttgtctattttaaaaaaaataagaaaatgaagcctaaaagatatttaatattaactaaaagtattttaatttatgatatttttaataaaataatttaaattaattaattttgaccgttatagaacaaagaatcaaattattattttataatatatattaactaaatgttattattttagtgaacataaattatttaatattaaatatgttaaagaataaaataaaatatagaatagaaaaaatacaaaaaggaataatataacatacattattatcaatatttttttaccattttttgattatgcatagagctgaagtcatatttctcaaggaagatatttgaacacatataactcttaaaaatgtagctaaaacaatataccatctagacgggaaacatatttaaaaaatacaagatctagcatagtttattaatgacaaaatggatgtgtagcaaaaataagaggaaaaaaaaagaaatgaagttaaataatgatttttttcttgtgataatatacctctcttgaaatcagaccttaagccattgatccacttaagacttcatctcttgtcacacctttgtaaatctatcaataattagactcaactaattgaggtaagaaccaacaacattgagaaagaatgatagtaagtaacaataggtgtttaattagttcatagagcttctaacttctgaaataaaataataaaaaaaacctttaataatatatatatatataacaaaagatgaaagactcaaaggaggagattgtggaaatcataacataaaatgaaagacaacaactgcacttacccacgaggccatgactacttactaatgttaaaattaaaaacaccaagaaactttgacattagaatcacaaaagtgaaaatgaaaagaaaaaaaagatggatgagaatcaacacatatccacgactttttgttgttgaacaaaacccttttgatttctcaaatgaaaaacatcaagaaatccattaagcaaaaatgagggaaattaaaaacaaatatgaaatatatgtaacataaaaaaggtgtgagagagatgaaagatgcatcaaatgcctgtaaatttgacattagaatcacaaaagtgaaaatgataaaaaaaaagatggatgagaatcaacacatacccacgacttcttgttggacaaaatccttttgatttctcaaatgaaaaatatcaagaaatccattaaacaaaaatgaggaaaattaaaaacaaatatgaaatacatgtaacaataagaaaggtgaaaatgacaaaaaggatgagaaaacatacttaccaacggtaccgatgcagtagtgaaggaatgcaagatgcaccaacaaataattactatatcatcggtgattttgagtctctctaaaaggaatgatgaaaataatattggaatcttgtaaatttgcaactggctagtacgatacctgcaatatgcaccaacaaacaattattatattaccagtggtttagagtctctccagaaggaaagatgaaaataatattgaaattttgtagttttgcaactagttagtacgataccctgtgtacataggtaatatcactgcctacactttaaagagagaatgtgtgagagagatgaaagaaaagatataataggcatttaagatttaaaaggaaatattggagtatacttatcaaaaaggaggtgcaattagcaagtatcaaaatttaatagagggacttatcaaaaaggaggtgcaattagcaagtttcaatttttttgctaagagacttattagttagggttgcgagacttatcatttagcaagtttcaattttttcctgagaaacttatcaaaaaagaggtgtaattagcaattttcaaactgatggggtgtcaggccccttccttcttttattatattttattatatagatagaatatatacatagaagacatcagcgcattcttttaccttccgtgtgggtatgctagaagttaagcagccaagcttcattcttgaaagtccctatatataagattataggtgcatacggattactacctgttttttgccaaattaacggattattacttttcaaagcaaaataaatatttataaaataaaattattcctaaaaaacgcaaaaatgttctgagaatgaattataacaaggagtaatgctatttttcaaaaatgtaaatattcagacattgtttaaattttaatataaaaaagaaagtggcaatggatataaaggtccttacatatttaacataaaggtgcacttatctgtctataatttcttttatcttttaaatgagtttgagagaacaaatagtaagtttagaaaataattaaaaggtaaagtaattaaaaatgcaaaaattttcaacaacatcgttttcaatttaggtttaaatattttttttctgtaatttaacacttttaatttttatttctataattttttttcattagtctttataaaatatatttatttattttaaaatactttagataactctataaataataaaaaatattttaaacagaaaaaaaatgttatctaatatgtttaaggaaaaaaattgtaaataaggattaaaaaaaattacaaaaacaaaaacaaatatttaaacgttcaaaaaaatcataaacagttaattaggaatgacatttttaaactcataattgtgtcatttgaccaatcctcttatccccacgtcaaagcgattaatttcactcagaagtaaaaacattttcattcccgaactgaaacttccgcaatcagcatacacgtttatccgaagaaagcacaaattcattggccagagagcggacacaaatttaccataaagaaactacatacactactaatccagaaaacggcaccaaactagccaacattccaaaatttcgaaaattcaaaaaacataaaacatattaaaagactgtttctccaatcattgtttctttctaaaaacaaaacaggcaattaagtcagatttaatcaacttcttccatcttgctaccctcagcatcggcatcagcgtcctccagaggaggcatcatgtcagcatctgcttcaccagcatcttcatcaatactcagtccaagcttcagcatcctgtgaatcctgttaccgaaagtgttgggatcatcaaggctgaacccagaagttagaagagcagtctcaaagagcaagagcacgagatccttcacagatttgtcattcttatcagcatctgctcgcttcctcagctcctccatgatggggttctcagggttaatctccatcgtcttcttgctcgacatgtatccagccatgctgctgtccctcaatgcctgtgctttcataatcctttccatgttggctgtccacccatattcacctgtcaccagacagcaaggagaatccacaacacgatcagacaccacaactttctccaccttgtcacccaacacatccttgatcacatggcaaagaccctcaaatttatcctttagttcttccttctttttcttctcgtcttcactctcgtcaagtttcagtccttccttggtagcagagaccaacttctttccctcaaattccttaagctgaccaacagcatactcatcaatagcatcaaccatgtagagaacctcgtaccccttcttcttaagcttttcaaggaagggggaattctcaacagctttcttgctttcaccagtaatgtagtagatgtcattctgtccttccttcatcctggtaacatagtccttgaggctggtcatctcatcaccactcttagtggagtgatacctgagcaattcagctagctttgtcttgttctgagaatcctcatgaataccaagttttaggttcttagagaaggcttcataaaacttgttatagtcctccttgttctcagcaatttcaaagaacatctcaacgcacttcttgaccaagttcttcctgatgactttcaggatcttgttttgctgcagcatttctctagaaatgttgagaggaagatcctcagaatccacaatacccttaacaaagctaagatattcaggcatcaactcctcacagttgtccatgatgaagacacggcggacatacaatttgatgttgttaggcttcttcttagtgtcaaagagatcaaaaggtgctctcttgggaataaagaggacagccttaaactccagctgaccctcaacagaaaagtgcttaacagccaaatgctcttcccaatcattggtaagactcttgtagaaagcagcatattcttcttttgtaatctcttcaggtttcctcatccaaataggcttctgcttgttcaccaatgaccactcgtgagatacctccttaatggtcttctttttcttctcctccttctccttatcttcatccacatcttcaactttaccctcctcatccttcttctcttcctcatcctcatcatcagaaatctccttttcagtagtcttctcaatccagagagaaataggatagctaatgaattcggaatgcttctttatcaaatccttcagacggcgttcctcaagatactcaagttgatcttccttaagaaacaaagtcatctttgttcccctaccaaggttctcaccagatgtatctcttgtcacagtaaatgagccaccggcatgtgactcccagacatactgttcatcatcattgtgctttgtggtaacaataaccttatcagctacaagataagccgagtagaaaccaacaccgaactgcccaatcatgctcacatcagcaccagcagccagggcttccatgaattccttggtcccggaccttgcaatagtaccaaggttgttcaccaaatctggaacataaaacgcacatgcattagagaaaacagactaactaacatgcacagtccgcgataatctcacaaagactaacaaaatatttaatcttaccagccttagtcatgccaataccactgtcaatgatagacaatgtgttgttggtcttgtcaggaataatgtgaatgaacaactctggctgagcatcaagcttgctcttgtcagtaagactctcaaatcgaatcttgtccaaggcctacattgttgtaaaggtaataacatgtcagcaatcagatataaggcccaaagtgtagaataagagaaaacctaaataaagcataattcacaccaaatccaaacgatccactcactccccaaatagaagaacgtattaacagcatcagttttgcctcaatcaagatgcaatggttgcagtaaaaaaaacggcatagtactacgtaaatctcacataacagagacaacaggaacagggacaaaaattatgtacccgaaactcaataaatttcaattatgctatttaagataataaagagaataatcagcaccgtttaacaatggaaagagcacaatatcataacatgaaccctaacaaattaaaaaaaaaaaaaaaaaaaaaaaaaaaaaaaaaaaaccacatcaattgttgaactatgaagacaacaacaggtaaacgcacgcaagagaaatcacaaaaaaataaaaggggggaaaaagacatgtccaacaaaccctgcatgtgtttgagcaataaacatgaaaataaagaacgagcgcagtaaaggacgtaatcaacaaacggaaatagaaaaacctaacaaggatcgataaaaatcttacgtcagaggcattgctgatgagctcacgaagaaagatctccttgttgctgtagaaggtgttgatgattagactgaggagctggttgatctcggcctgaaaagcgaacgtctcagtctccgaggccatgtcgtttcaaattcggaaaaagagggaaggtagagagttgcagcgaagatgctagaacagaacgaaaaggaaggagtgcttagagaaaatggaagaaagtggcaagttatatagcaagtgttggctagggttttatgtcttctagatccttctacgctccaactaatcgtcttgcatcaccgttttgccgtggacttggtttagttcgttttcagccattagattagatttgatagattacaaattattcatatcatatataatagaaataaatatatatcaaatgatcttgatgaaatttaataaatttgtttacagatgaatattaaatatatccaaatctaataattacagacttagtaatcctaattcatgcaattcttaccaaggatcacaataaaaaataaaaaataatagtttgttgtccttacaataacgtatctctataaataggagaaacaagatagtgtgagcaatatatgatataaagatggtttaaattaggtaagatataaaataagagttaggatcacgatatatttttggtttctctaagtttttttttatgattttttaattttgatttatataatttttttatttttttaaacttatgtgagtttgtactttttcaatttaggtttatgtaagttttttttttcttgtaagtttgtgtttttttaaattttgattaatgtaagtacaaaattaaggagactaaaaattaatattaaatctcttccaatatatttaaagaatcaataacgttggaccttattgtacttttcattttaaattgatttaatttaattttgtgctttatgatcatttaattgattatcagtgaaattaaatttataaaattgatttaaattataattaaaaataaataaaattttcttatccaataaaaaagttgtctataaaaattaaaactcaatttgtatacataatcaattcttcaatatgtgaccaaatatgtgaacgattatctaaaataacattagttgatattttaacatgattttagacaattcaacataaaatcaaacacacatttataaagtgttggattttagtgatttaaaataaatgttccaatgtttggtatcatgttgaaaaattatttatgagcacataatggattttgagttaaagcatgtttatgtaggtttacattagatgaaaaaaaattataccaatttttactattactttaaattttaaataaaaatataatcataaataaatcactttacttaaaaaaaataattttgcaaaatcaatttgattgtgattaccctaaagatagtgaaggaaatataaaagtaagaagtatccacaccacctattatattttacacttttttctcattctttcccaactaatatggagtgttgataattgttatgcatagtaaagttacatgtaaattacataacaattatctcatttttttctctttttaatgcttctttttgcgattaaaacttaggaattagtcattttatgagcttttatccagtagatgctaaattttgttgactataaggtgttgattgtatttttttgtaaaaattcactgcaaggacaaggaaggagaattgagggtctactcgctcaatgcgcagagatccactcagcgcaactagttcgcttagcgcgtggtcatttatccagctggacactaaaggcacgcttaacacgatatctcccgctaggcgcgtgaccacgacactaagttgcgttttaaggaaaaatatgagggaaaaagaggggattatcttggaacacttggacagacagaaaacaagcacttaggtcacgaaggagacatcattccacaccattggagctgtcattcatcattatgttcctcatttccctccatccactccatttcccttgccttaaccctccatttgtataagtctctcatgaaaatgagaggctagaattccattgttgggagctcaacaaccaaatataattattctaattatctattcaatgtcattttcgcattattattgttttctgagttattatcatgttagtggtttgatcatgcattttcatgtattgtaataggttttaatacattggaaaattgttattttcttataattgaaaaacacttctaaatgtaccatttctagggatagaatggttttgtttagcctaagttgtttatctttaatcttaatgcaaattggttaatgcaactcttaagggattaagagcaaaattaagtgatttagggtcttgcacttgaggaatcatggctagaatatattagtagatgaaggtgattgggaaataatattgaatagcgaaaaatctttaatattgcatcaaagttagtttcgattagttaagctcccaacatacatcgcatcgtatttcaaccatcactgcaatactctgagtgtttgtgtctttgttatttgtatttacactgcttcatagtttagtaggtcaagtttaattatatgtcatttactctaaagaaccaaattgattaattaattgtttagaaacgaacgtgtattaactctgagtacaaacaaagttcatgtgaaatcgacattcggacttaccgtctaattattatttggacaaattggtacacttgacaaagtgttaacaagtgctccatataacattataataaattgttacgtgtgtgtttgtggagatcattaatatttacacttctctttttttgtcttttaactatatgattgaatgatatcttttcatattatcaaagcttaggttaaacttggcatggaataaatgaaaaatacatgcaatttactttgaactaaaagtttaccctttttcttatcaaacttaaaaataatgaatagtaatatatatatatatatatatatattgtctcttatcatatgtgatgtgtatggcatcctcttttccctaatttcgtgtatttttaaatattaaataaattgttattttagtttttactattgatgctttgataattgttatgtatttatatttttgacttaaaataattaaaaagaatcctatcagttagtttagaagattattataaatttaagtaaattaagaatttgtggtgtatggtaaaaaaatggaattttaagtattaaaatgcgtttaaataattatttaggatttattttattgtatagataattaaatgctagtgttagatttaattaagtattttggttaatacttagattgggagagtgaaggatgagtcgttgaagcccaaataagtgtgtttcccctttcactttgatttgggccaaaaagcacctaagcccaaatatgtcaacaaaaaaaaaacaattttttttttcactctcctcagtcctaacccaactagcgcgaagaggatgcgtgagaattcgagtaattatataacagtattacgatacatttgttcagaaactaaaataataccagtttattcttgaaacctacaataggcttttgaactagcagatctgctggaatgagatttctaatctacccttatagtgcgtggtagattcaattttaggttcttggacaattttttgtgagttttatggtgtcatacaagatgcaagtaattttttcttttttactttaagataaatcacattttggattcttgagtcacttttaaggatctcacaataaactccacttaaatatattttattaattaattggggatagagacataaaaatatatatttttaaaatgggaatagtttttgggaagatttttaaattcaaaaatcccatgcataaagatgttcttccgtccaaacaagtgaattgtcagctgaaacttggaagtgacccatgaacatgaacattgctgatcatccaactcttcctatgatttcactgtttgttgccgcctagatcgatctgcacaacaaattcattcgtgttgcatggatataggaacacaacacaagtccattggtacagcttcgggtacaattaatggttccacaaaattgacaagacatattaagatacgtgcatgagaagatatatttcatgtaaaaaaaataagaacatataatgatggagtataaaatcgcaatcacaatatatatacaatttttcataatgttatatgtaactaattatatatacattataaataaatgctggtatcgtggtacggaatagtgcctagtacaggtacaagtatttaggagtaccatgacaaatagtagtattcatgcatcgtactttctaatcgcaagttaacactttcttcttttctagtcaacattatctaattgatgggctacggaaatctgttgctttcttccggttgttccctggctccctcccatctccaaaatggaatgtaaaatagctttggcttctttttatttatttattagatttaagtgaaggattcatgtatgtcagagataaaagggaagatctatgaggattgataaataaataaataactaaacggttgagattttggttaaaaacatatatatgacagattatatatataaggttatgtggaccttaaccaatatgaacaattaatggatgtaattatgtaagtccttaattttttttatcttcttaattaaagtgaaatacttgtttcaaaggggaaattattgtatagtggagatcattacattgtatatatcttccactaaaatgtaatatatataatcaaaattatgcgcacatataatggttccaaaaactctatagttatttttagttttatagggattgaaatctataggttcaagaccaccaaaactttaggcacgtaatggtcccacttttgtttgataacacattacctataggttaaattattctggttcgtggtttataattaattaatactgcatgactttgttttattttttgaatcgcatacgaatctttgaacaagttagcgagacaacgctcttaattatgtttcagtggacgccacaatattgattctaactactgttatcttaaaaatgacttgtagttatcttgatggcaaggaggtcgctttgtaatgatgaatggaaacagtgaatagaactagtttatcgaccataggccatgattaaagtatataagataattaatgtgaacaagatgatccgatcaagctaaatttttcactgtaaagatgcattgcaacccttgaaaatgtttctttttctactaaaataaaatatgaaaacttgttttgcaaattgcaagctaatttaccattggatgatgagtgcagtttaattgtgaactctaacgaagagatgatcttaaaatcaatgagtttccacacaaaaatattatagtacgtaatagataagatatttacgcattaactggcatggacgtataattttatagatatttacttatactttacgtaatatatttattgtacaacataactagaatttgaaaagaagaagaagatattttttaatataaaatatgtaattttactcaattggtatagaaaatttgtaagaaaggagttttttccgtgcatactttacgtgcatgagttgtaattatttgtaagaaaggagttttttttttttttttttccaatgtgaggtttatagaaaatttctctccacaccataaggagagatttctttacgtaagatccacaaaataatagttaggtcatttctcatttaacatgctctattttttccattttttttttttacctaaggataaaaaatttatgatcttttttttttatgctggataaaaatgttctgatctaaataagttaaaataatttttttaatttatcgtttatcatttctatttatccaaacaaactattattttatttatctctttttattttactttttttttttgtatttttaacggtcaaacaaagttatgacaaataaatgtccctgcatgtcttgctcatactaatcttgacgactgacatgcagcaggaggatttttttagaaaaataatagtttttttaaaataaaaaatattatttttcaaaataaataaattcaaacacagtaatataaatataattattttttaaaaaatggttaagaaaaaaaaaaaaagccactaacctccagaagacccaaagctagctagtttatttaattgcaaagtactaacagcaaaattcctgggcttaccattcatgactcgtgggtggagttgataggacacgttcaaagtactgggttcatatatgtaaaggatgatattattatattctaactttccatgcacacattacatataataatttatagcatttggaaagtgatttaggaacagaaaccagaacttacggatatatttagacagctatgaattatgatatgatcaaacagtcacttgatttaatgtgattttctttaggaccactatcttttatcaaagacgaagttttttcaagctaacaatatgtagagtgaaactgactctttggaatgagactgaaattgaagaccatatttttcttttaaccgagaagaaatctatctattcgcacagataatataaaatgacgtgaatacgtgatgttaattatttactttcctgtgcatttattcgtcattttgtgtatattttcttatttggtgattagtaacaaattcgttctttcataccaaactattggcacgaaatagcacaactcaagtaaatatgtatcaccaaactatataatccattagcaggttaatatcatttatttttttattggagttagaaatactatattctgtataatatatcaaaaaaagaaagaaagcaagcaagaaagattatatgtatatatgggcaagctataaggctatgttcggggatatggcaaagtctttttaataatggaatcttcatggaggaaaaacaagccaaaactcagtggagcactttgaaaggtttaaaaattagtatagtgaagatctagagaaaaacaattaaaattaatggatccatatatgactttaagcattcactcattgggtggcaatggtctctaagctcccttcacattgaattaatttgctaatgcggtaggtgataaatctcaattatagacaaattgcttaggatgtcgacctatatggtcttatctctatgatttcgggaaacaatcacaaattggaggaattggccaaataattagaaagaaacaaagatttcaattgttttctaaacagtaaaggatttgtgatattgatcagggatggagcctcccaaacgtgtgaattcgggaagtgtaacttggcaattcttcttacatgatttttgatgcccatggaccctatatatggcttattaattaattaatattatggtgatgggatttcattattatgtcactaacaaatcatgcttggttcgatcaatccgtgttattattggggattcaaaagtccacttgatgtgcatcgaattcaccacttgctgactctattgcacgtgtgccatgcattaaggacaaaagttcctatgatgctatactggtagacctctcaaagggtccacctcaatgcaaatcataaaatctctcgctatctttctctctctattcttctcatatttccagaatttggggcacggggaagccattctgtttttattgtatgattacacttgcttgtatgattgctaaagagctaatgttgactaggtaggcaaaacaacaaaaataaataaataaacaaaaaaagagagagagcttaatttaatgtgcagatcactaatcattaatttgataaaaatcggcttagagattacatgtcttttttatgtaataaaacaatcttcaaattaaataagactaatataaataacaaaattctccttcaccatatttaatataattagatacttaatatttaaacttgatatcccttattaaattaaaataatttcatataaattgattcaaattattatctatcaatcttgtaagtgatatcatattaagctttaatttaataatatgggtggaattaccatgctctataatggccagcttctttcatacacatcaatggcccatcttccagcactagtagtagaagttgcggctatatcagtgataaaatggcttccgacaatacaataagaacatgcatggacagaaggctcatattgtaatcgaatggagtggtgataatgtgttcataggcaatactaatgcgctgctctaataataatgtttagacactcgtactacatttataatttgtggccactctattgttggtcaaatttgaattttccactgatgttgttcaaatagattattgatcgatattctcctctcatgagcatgcatgagctcctacctagctaacaacctatcactaaagagaagctacctatcttacaaataattacaactctcttttccttatgcaattaatttgttttcccaaagtaacaaaaagctagctgaggcctgacactcacttttaataaacaaatattggagaacccagggagcttttttttgggggggggggggggggggggtattataatcttaatggacaggaatatcataataagttgataagcaatgcttcaatctaaacataaggtgcaccacattatgacagcctcagcagcatgtataggttagattttttattattgccatatatagaaaatccagcaatgttttgtttcatgtcatgtgcctggctattttctttgtgaggattagcttatgacttgttcctcatgttttttttaatcaaatgttggtggatccatgtagtacgatatacaacagcaggaatgtgatttagattaaaaaatacgattcttcatatacacaaacaataattttcgttcatgtttgtcgaaaaccgtcgtggtatgagtcacatagataatggaattcaaatactcagaaggaagaagggaaggtgtgtgcgtgtgtggatggggggcagtgaaaaacgaaaagaaaattagtatttatttttaaaaaaaaagtaattcttgaatttaacaagcaagcatgaaagaaaaattaaaaatgggttataagatatgttaattaattaagacagaatcacatagaggaatcaacaattatataacttggtgtaaatgggagtgctagctagaagtgttgcgtaattacatttttcaagaggagctaattatttatctgtggttatttatgattttctctgttagagatgaagaaatttatggtggaagtggaaatcatgatcacattttttttcttattgtctaatctttctttttcatttactgaattcatcttgcatgggattaccaagtgatccaaaagggccttcttgtttttcatagctattgggtgaaaaatgacatcatgccatatgtgtaatgtaaacttgattgttcataagatgcccccaggggaagccttttatgacttgctctctttttcttttggggttggatatatacctttatgactacttttttacaaagagatttaaagccgacaattaataaaatggtggggttagaggatggatcgtttcatactaatgcaagaattaatttccatccatgtatacatggtgccttttgtctcttctttttaatgtcattggggtccctttattcaccctcttttgcctcgttgatctcccctttaccatgaaatattactttttcttttattttcttttctataaatcttctgtcatcatacatcataataaattaatatgcttactttgaaattccattattttatgcacaaccatctctaaattagtaaaagattaagtttagggtcaaattaatgtggactataagcctatatctaagcagctatttggttctaaaccgttaagttaaagctattgaattcaatgaatccaaagctgtcaattacacattacacgaatgcatatcataaataaaacttgtcctaagtctacagtttcgatttgatgattcatgatgtattagtgggtgtagctgaaacttccccatcgatctattatcagcaaaatgaaggagatggtagatgggacaattggcaaagattaattttgatagtatcatgcaattgctagattcataatgcacagaacagagtcataaaagttcaaattagataaggcataaggatcttcagtcatcttcaagattcatttatatgataggtggggaaagcggtaccctaaagttgtgtgtgtctggaaaaggttgatatagctgtaaatgtgtctagagagtagaaacagcatattatatatatatatatatatatatatatatatatatatatatattattcatttacagcatattatttttttatagattttatagacaaacttattttaggataacatgatgtttcaaattgagagtaagggatccaaaataattttatgttctctcaagatatttgaaatgttcaaatttgaatatgcatgtgcctaaccataaggattcgaatttaatttaaatatattagaagtatatatttttatattataatttaattataaattgtcatgtatgtaaatattattaatttataataattattttaaaatttatattgataataaattctaattgactgatctcgatagtaaaagaattacactgacaatttatgaaaattaaactcttgtcaattaaaaataattttaactatgtttatttaaactatcattataaaatttaataagatatatgattattcatgattaaatgccagaataaatatctttacaaagttaatatatatatatatatatatatatatatacactttaattaaattctttcttttaagttttgttctctaactatggtgaataagatatatactggattagggatcgttgattatcttggcttccaatttttgtttgtttaaagaagagttgcatcatttgagttctactcccgaagacactacaatagaatttctttttgtttttcttttcctttgtcgcattaaacgtacaagccttaattactttcatttctataaggtaatcataatcctgtttattttgccatgtcccatcaatctaaactttttttttttttctcctttcattgaatcaaatcaatctaaactacctctatagctaaacttgtcacggtactgtacaaattaactaactatctgtttattggtatcgaatgtatagttctcttttttatattaaaaatatgttataaattgttggtagttatctacactacacatgcacatgcttcaccccaaaagcacaaaatggtgttgaaaataccttttacttccagaaggcatcttcaagtacatggcaattatggaacaggtagcttctgtacctgtaattctgtcaacacataaaaacaagaacgttttttttttttaatctcagtattttctagttttaaaccgtgacacgtgatgaccactttggtgcaaattaagaaggtagatttatgtatttaaatggacattttttttgctagttatctagctttgatttgcgaataattccaattcaatagttcaatctactgtaaatttgtaccttccactcttggtcaacatacctttcatggttttctttttatttctttaaagcaaagaccaacaaatacttatgaacagatcatgcacatattataatatcgttcttcatgtattcccttgcttccatgtgcacttcacttctccatcagattcctcacgcactccttcatttaagtatatataaacaaaccgaaatgtgtcttattactatttgtgaactaaattatgtccattttgctcctataaaattaatcaccacgaatatctcagtaatttgagtaaacttgacaccaatcatggatacccaatttagattttgacaatggaaccaaatcctttcgttgcactcttggtaatttgatccaaatatgcaagttagttgcttaaagttcagaaattcaaagggtagcatgcagcaaccaccacatcagtggctcatcaaaaactacagccacacaaaagcgatggaccacaaaatgggcctagctaattaaaggaagaaattatctctttgattaaccgaacagagagctattacactcaaccatcaaactgtctattctgtttgattaatcatccatcactatctagagcaaggtaagataattacattaataaccaatttcaaaaaagtgctaaagtcattttccgttgcttgctgctaattaatctcaacagctgattaaatacatgaagatgaaaagtaattattattaccaaattaaagcaggaaacaatataaaatatgtgtccacgtggggaacaaaaatgcaaaatcttctttacattattttcaccctccaccagtttcatgtctcacagttcactattaatgaaacactatctaacaggaactaacaaattgaattacatttagatcgcaaatttctaaaaatttcaactcactacttgacacgttaaccacaacaaaccaataaaaaagaggagtttaccaagatagtgtagtatgattgacggataactatgctccttaaatatatggtcataagttggatccccagagtttgtgtaagaaataacatatattggaaaaggtcagactcttagatagatttcaatatattgagagattagtctttgactctcgtctagagataccctaggttcatcttgaaataaataaataaaaagagaagtttagcttaataaaaaccaacaaacatcatcatgggtatggagatgtccttgtcattgaacaggagcttattacacaataaaagaacaaggaagctagctcttctgaccagagcttcttctcttcctctataaaaaaaattcatagaatttccccctctacaatcccaaaacagatcaccacttctcttctttcacagcaatgcctgtcatcttaagaaatctgtcacttcctcccaaaatcttctccctcaccttgcttctcttattaaactctcttttgtttgcatgctgttactcccttaatgagcaaggccaagctctattagcatggaagaacagtttatacagtacttcagatgcactagcatcttggaatccttccaacccaagtccatgcaattggtttggggtgcactgcaacttacaaggagaggtggttgagataaacctgaagtcagtgaacttgcaaggttcactaccttcaaattttcaacctctcaggtccttgaagactcttgtcctctcaacaaccaacatcacaggcatggttccaaaggaaattggagactataaggagctcattgtcattgatctcagtggcaattctctcttaggtgaaatcccagaggaaatttgcaggctgagcaaactgcagactttagctctgcatgccaactttcttgaaggcaacatcccatccaacataggaaatttatcaagtcttgtgaacttgacactctatgacaacaaactgagtggtgaaattccaaagagtattggctccttaactgatctccaagtgttgagagtaggagggaacacaaaccttaagggtgaggtgccatgggacattggaaactgcaccaacttgttggtgttaggacttgcagaaaccagcatttctgggagtcttcctccttcaatagggatgctgaaaaaaattcagaccatagccatttacacaactctgctgtcaggccctatcccagaagagatagggaagtgcagtgagttgcagaacttgtacttgtatcagaactcaatctctggttcaatcccaagtcaaattggagagctcagcaagcttcagaatcttctcttgtggcaaaacaatatagtaggtacaatcccaaaagagcttggaagctgcacacggcttgaagtcatagatttgtcagaaaatcttctcacaggtagcataccaaccagttttggtaagctatcaaatctgcaagggcttcaactgagtgttaataagctttcaggcattatacctcctgaaatcacaaattgcacttccctgaatcaactggaagttgacaacaatgctatttctggggaggttcctcctcttattggcaacttgagaagcttgactctcttctttgcatggcagaacaagctcacaggaaaaatcccagatagtctttcccagtgccaagatcttcaggcacttgacctctcttacaacaatttaactggtccaatacccaaacaactttttgggctaaggaacctcactaaactgctgcttctttccaatgatttgtcaggctttataccacctgagataggtaactgcacaagcctctacaggctgaggctaaatcacaatagattggcaggtaccattccatctgagatcaccaacttgaagaaattgaactttttggatgtgagcagcaatcatcttgtaggggagattccttcaacattatccagatgtcaaaaccttgagtttctggacctccattcaaatagtctcagtggctcaattccagacaatctgcccaaaaacctgcagttaactgacctctcagacaacaggctaacaggtgaactgagtcattccattggttcattaactgaattaaccaaactcaacttgggaaagaatcaactcagtggaagcatcccagcagagatcctatattgctccaagttacaacttctggacttgggaagcaatagtttctctggagaaattcccaaggaagttgctcaaattccttcactagaaatctttctcaaccttagttgtaaccagttttctggtgaaatcccaactcagttctcaagtcttagaaaacttggagtgcttgacctctcccacaacaagctctcagggaacttggatgctctctttgaccttcacaaccttgtttcactgaatgtttccttcaatgatttctctggagaattgcctaacacaccattcttccggaaactccctctcaacgatctcacaggaaatgatggtctctacattgttggtggtgttgcaactccagctgacagaaaggaggccaagggtcatgccagattggctatggagattataatgtccactctcttatgcaccagtgcagtactagtacttctcacgatccatgtcttgatccgtgctcatgttgctaacaaagcactcaatggaaacaacaattggctgataactttgtttcagaagtttgagttctctattgatgacattgtccggaacttgacatcatccaatgtgattggcaccggaagcgctggagttgtctacaaggtcacagttccaaatggccaaatactagcagttaaaaagatgtggtcatcagcagagtcaggagcatttacttctgaaattcaagcactaggttcaattaggcacaagaacatcatcaagcttctgggttgggggtccagcaagaacatgaagcttctgttttatgagtatctccctaatggaagcctgagctcattaattcatggttcaggaaagggaaaaccagaatgggagaccagatatgatgttatgttgggagtggctcatgcacttgcatatttgcaccatgattgtgtgccttccatattgcatggagatgtcaaagccatgaatgttttgttaggtcctggctatcagccttaccttgctgactttggcctagcaagaattgcaagtgaaaatggtgattatactaattccaagccagttcaaagaccctaccttgctggctcctatggatacatggctccaggtacttttttcacgctatgtttgaattagttatttttcggtacttgcataaccccttgaaatagtactaattttttgttgttttggtatatgtacagaaattgcatctatgcaacggatcactgagaagagtgatgtgtacagttttggtgtggtcctacttgaggtcctgacaggaagacaccccctagacccaacacttcttgggggtgcgcacttggttcagtgggttaggaaccacttagctagcaaaggagacccttatgacattcttgacccaaagctgagagggagaactgtttctactgtgcatgaaatgctacaaactctagccgtgtcatttctatgtgtcagcaaccgagccgaggaccgtccaacaatgaaggacactgttgcaatgctcaaggaaattcgaccttttgaggcctcaaccacaggtcctgatgtattaaagggagttttaacagtgcatacttctccagcacctcctatgaaaggtgtttcacatggaacttctaattgttcctttaatttctcagaggactcaatctgttgagcaagcatgcaactcatagagaacgtatgattcataacatgtgcatacaaatggaatgtcagttagagctggccagaagaattactagagatgttcaaatttaatccaagatatgtaatgcatatttcaagaatccatgtattcaatttaaataataataaaaaaaaatatattctagaatctagagactagagcctttcacccaacaaattaattaagtttcaggctaggtggttcctcaatccgatgtaaaagtcaccttggcattattgatatctttgtaacctttgtgcttttacctgaattcaaattttgatgttctgattttagtctttgtggtgaattaactaacatggaaaacgataataatttcctggtctacaagtgctgaaacttctcagatattactgccaactggggcatttctaataaacacagtagacttaaaagtccatttttaataaacttctacataagtacttaaaagaggaaaaaaaaaattgaacttctctcatctaacttttctaaaaactggagcacataagttgattttaacttattggacaagtttaattcatttcaccttcttatttttttctaaggtaagtttatccaaataatctgtcaacaagtgatattaattacaatgattggaatttttttggatattacacagaaaataagattcttaggctgcatctctctctctctctctctctttctctttcacttattcacacgcacgcacgcatactcaagtcagcctttcaattccacatggtcccacgttcaatacctcacatgtcccatgtgctctctgaaagagactttgcatttgcaacaattggaaactccttcagaagcacatattaagtttggaatgaatgaaagtctgtgtatcttaatcacacgcacatgtacatgcaggaccattattattctggaaatgtgaaaggtaacatgtaaaacagatagaccagttagtccagcagcatatgcagattgcaaatacgaacaagggaattttttttatcatttgcaaggttcacaaaattctctgaactgaccaaaaagcttattcagttatatcttataagattctttcgtgaacaactttctggcatttcttggaagagtacgaagaggactggaaataattgaggagcagagtttgtggcattgcattatatgtgaaaagaatgagtacgagaataacgatttaagtacattaaaatatccacaaaaaataaagtaaattaaaatgaagttgcaagaagatttcaattattttatactaatgaatgtcttcaacaataggaggaacacaaaagaaaattagagcatggatttgtcataaagtaacatttcttctcatcagaatatgattttcctgcttttccttttgactgtaaacactgaaaattgtattatgaacaaatttaaatccttttataataatattttcatttattagatattttttttatattttcaaagtattaaatgcatttactttttcatttaaaactattttttataagttttagaaattttgataaaaatattgtaaaaggatataacattttttttaatccatccatttattttgtactaatttgtaatcatccatgtatttgtactaatttgactagaggaaactaaattccaccctttagtttattctttttttctttacttttcagtaaaatatgttttttttttttttttttttaaaagatgaatatttttcaagcaacactaatatggttatattttatttttaatacattattattgttaacaaaattatgttattaataaactagataatattttatgtgtgactaataaggtaattataacaaaattactaatttttaattatataattaattaacagtataaaaaatatttacattgtcatacgttctagttaaattcatttaattaacatatttagttgaaaattttctacaaaaatattaattaatatctctttttaatactgtttttcttattataagagtctcaataaataacttgaatttactattaattagtaaagtccacattaaatttaacctaataataaataatgtattaaaaatatttttttataagcaaaacttaaagtcgatagttttctatgcaattcctcataaatatgttccagattttaaaaaagaacaatcgcatttttcacaaattttatttaaggaaaaacttagtgcacacttgagagacctttttttagagggaataattgcttatttttaataagcactctttcaaaaaaagctaaaccaaacaaacaatgtgaaaataaaatgatatatttaaaacgaaaaaattacataaaattctgtggtgctattgaagagttctggtaactgcacgtctgcatccaactagccctttaagtctcctacgctttatgaaataatcaaataattcaacacatgccattatatcatatcattaatggcactcattctgctctagaattctgaatgctagttgatgaatgactgttattggataggcatgttgataatttttctagcgtaagcacacatttaagataagcagacgcatcaattgtttctagatcatatcatatcacacgatatctacaagaattgacacagtggactcacaacaagtagcacctccttagtggtgcttgctgctgtctcagcctcaacaagaaaaaaaggtagcatcaatgtacccagacaagtgtagtcttgtgtgttcaaatgccacatggccttgagcaaattgaagcaatgaactattagttttcttgcaacagcattaagagccaaacgaggcttcaaccctaccatattacacactatacattttcaagaaacatgtatggagcccaccaatgaatttccagattgatatgaatgttggatgtcccaattgtgcactatggagaattctggtcctgcctgtctaatttctttagtatgaagttaatgacattccagtcaaagccacggtactgaagccaccgaacaattcgtgatttccttgtctccttgagtacattctgacctctgaaccactgctttgaggcctgagtataaagatgatccatggaatattttgacaagccaataactgacttgtgatcttcggcacaatcattgtccttaaagaccacttcaactgccttctcagcatcagcttgactaactcccttattgaatagtgcctgccacaaaaattgcaatccatcacacaaaagtatctcccttggatgaaatagcaggtatatatggctattgggcactgaaggcatgtggggtgaaaggtctgtgccttggccttgcatggcccacaacaacagtaaagaacctttaagcaaacactgcttttgtgcatccctagtgtgtttggggcatctaaactcgaggaaaatgatgagaagagaagattcaagccttcaatcaatcggttttaccttttctggaggacgggaagggattaggttcaattcaatctaggcaatttttgcatatttgggaaaaaaataatcagatagttttaaaatgaaataaatagagccctcaacaagtagccaagtaatagaagaaattattcgatcagataaattacaagagaaaagaattgggtcgaagctttgcatttgttgaacaattcgctatgaaaaataagccaaattatgacacaagtcaagcaggcaaaagacataattaaacttcagaagcttttagatgtagggaaaaatcaaaatatagattacatgcacaagctaaattttcagatacagataattacttagtaaatgatatattattattttaacattgtcctcgtatgcaagtatatattttcagattttcacatttgtgttcccaaaagagtaattgtggaaagggaaaaaaagtgaatgcatactgctctgctgaattagcaagatgctgtcacaatgcacgtcatcttttcctcctaattctatattctagagttaaaatgacgatgaattttagcaagcacaatataagcataatgctaacacaattatttcctcttctgcactgcaatgggattaataacaaaacacggggaagaagtattgatcaagaagataaaaaagcagaatggaacagccaacatgtaagaaagcaaaaagtaataggacaaacaaaaaatgcaaagaagattaacttgtttgatccgccttggcccccaacttgatgaagtccatctagattgagaaaatgtttcagcgtaaaacctatcattgatgaaccctctgatacaaaaaaggttaaaccaatcaccataagtaaacataaagtataaaaatgtctgcaaactcagtttataaatgaacttaaaaaagcatattttgaaaaatactgcacaatatcaaattaacatgatataaatgggtatatgcaaacttttaaaaaaaaattgagatgcatgtaccacacagtttattctgaatagaacagaattactttatctgcatatataaaataatagtgtttgaattaatatagaattaatcataggatatactctctttttaaaaaattcagagtctctatccttcctaaagcaagaaaagttaaatggaaaaagaaaacatgttaacttcatataaaaacagtagatctgttgtttatcagccattttcaaatgcatcctttatttgaagctttactcactgtcaaacaactacatcctaaaatggaaaaagaaaaaacaaaattcgattcccaaaacaaactccatgatttgtgttaataaatatcttcattacaaccgcacttaatgttcatcttcactcttctttattctaagatactaaaaaacaattttcagtgagttgattgttgacaagtaatcacccttcaccacaagtgacctggtaaaattataatgtcaaggtaaaagcagagatcatttccttttcattctacaatatcagcaaacttacataatttcctttttattataagttgttttgaatacaaaataagttagtccaaacacatagaataggtgaaactttttcggtttcaaaagcactttcaggaagcccaaaaaatgattatttgatatttctgcaaaacaagccataccaaacacactttaaatttcttgattccttttccctgttttctgtaatccaaatatgttatatccatttgctcttcaatgaaaaaaaggtggaaaaatagttcatcagtttctgacacacaaaataaattaaaatgaaaaaataagtgttgatctacgtgctgtataaaaaactaaacaactctatgcatatatactacataagacttaaattggtaaatgaccataagtcaaattatattagatgggccactcaaattctcaagacattcattcttcctcaatatccagttatctagccatttttctcatggagaccccatgactgaattaatagttggctagagctgcattcaaagtcacctttgtgatagcaatttataattgcagacatctcatttttaaggccagaaatcacataacataacatatattgctctcaatttgttgtaactggataaaaacttaaaggaaaccaaatttaggaagtagttgtctggaagcaagtaaagcttcaagtaaggaagcaattaaaattggctaataaacaacagctctccacagtttttatctagttaactacataccttctctggaacttgtttatcactgcctccactgcatcagcagagaatctctttccaagcaatttctttctcaactcaagtgctgtgagtgccctgtggaacagagagacaagcatgcttaaaagaaaagactgcatttttacatttaaacatgcacactcctctttccaaaagggaaaagatattagtttactaattattacaaaatttcttctcttagttaacaacttataagcaaactcaactcaaagaaattcattgttaatgacaatttgctaagatgtttctaaaggcatgccaaataagataacacttcgttcggcataacctcattcttcaatataaaaatatacaaacaacttcaatcaagttgaaatttctaaaaaaaatacatgggatatttgtaagtagatagtgactacaatgccaaagtaacacatactatgttttaaatttgtcttttagctttcatgttgagccttggcagttggcactatagtaaggtttttgccttgtgacttaaaggtcacaagttcaaatcttggaaacagccttcccttaaggagataaggatgcatgcatgtaccctccccaaactcaacttagatgaagtacttgacattttcttcaatttcttaatggaagtgttgaaagaaggtaaatacttgacacactgagtaaaacttaaaaaggaagtttcctcaacagggaaaacagcaacaattaactgcaaactcataatagcatggcaaaaattgatttttgttgcacttaaaaaatgaacaagcattatgctcgcccatatttggttcagaaactcttcaattggattgacaatacagtttataactagtctagcactgaataaattctatttctgggaggagggaaggggagacaacaattaacctagatgcaagtaatttaatagcagcttcctcgacatcccttgtaaatttgtcaatttgtatcaattcctggtcacaagagtctcctccctcatggattgtcaactctccaacctcttccatttgatccaaagaacctacaatcacaaattacaacgctcagaacaacttcacttcttagatatacaagttgtaagtgctgtttcatttctaatcataatgtttggttccgcagcagaatatcccattacaacaaagatagaaagaagccacaagttttaaagagttaaaaacaggttaaaagaagataatgaatgtaaattttttaatcggtgaaaacaaacacacaatgtatatcactgaatctagaagcatgaacctattatccatccccaatcttaatagtagaaggagatcgatcctattagaacctggagaaaattaactttagttaaccataagcttctcctttctttcccattattttcttaacaagcgtcatttttttttgtaagaagcttatttttattcaatttatcaattacaaagaccatcaatcacaaatcacaatgtatcctcaaaagcgtgaacaatctcttattacttttatggcaagctgagtttatccagtaccacaatataagaacattgaatcaccagacttaaatccgagtcaacaatcccatgtcaggcatcaaattgaattagaatgcttaaaatcacaaataaatctattgtatttagctataggtagtagtgacgtagttcccctgcatcctgcatagcgaagcacaactaactaccaaatgatgaaccaaaaccatatcatattaaatagaaaatagaagtttaccttgttcactgtcatcaaataataagtcagggcaaatttcattcgggtcttgagaaatttcacaatgtgcaattgttgcatgcacatcttttccaccatttatcttgagcacattaacatcaggacagctacaatatcccaggcttttcactggcagtgcagtttcaagtattttcaccctgcaggatgtgctggaaatgcacctaacaggaacagaagaactatagtctcttctcttcaagctaatctgaaacttccaaatactcctattttttaataccaaattaaaaaataaataattagaacaatggtcaaaatgtttcagaatctatagaaagctgaagcttatatttatatgtaagtgggtggagagacagaaagaaattgaagaacttccttcaacccagtagaatgcttccaattgggtagctaaactagaactccattactcatttactctcacaagaatcaagcttttctgccattttgtttcagtaaccaaagaaggtttagagctaaaaatgagagagagaagttaccgatgaattgaaaaaacgcgacagggaaagtgggacgggattttgaagccgatgtttgccgcgaaacctgccatgttcatgcaaccataatttgtgccttccaaacgaaggggttccccatttttggttcgtttctcctctcctcttttttattttgtccaaattttgttttccggtatggggcctgacatttgggtcggcccggattagccctcgtgggctgggctaatttgaatcgggctgatttccccatgacccagttaaaacgggctgtctgggcttggcctgtcactctctgacagtcagcaaggcataacatttgtttcctgcacctgcaaatttttattcccaaataaacttttcgaaatgtaattgaaaatgcaggatacaatagctggcataatcacatattcacaacttcacacttgaaccaatctccactcatattttagaatcaatttttaacgagtgataaggaattggatagtatgcatgatattattggttctaactttttgtaggaccatattaaattaaagaaaaagaaaaattaatgagtgtttttacgtggacacatgataaaaaataaataaatatattttttattaaaaggaaaagtttattgtattaaaacacaagttgttatctaaagtacaattgtaacaaaatatagttggtacaactggatcacctctttttcaaggaatgttaattcttattaagtagtaatttggtttgacatccaaaaagaagtagctatacaaagaaataattatacattcgaaacaagctgacaggagttattgtgctaaaactttttaaaataattagaaacatcaataagatggcatttaatgttctttatcatgtgcccatggacacaatatatatatatatatatatatatatatatatatatatatatatataaaccatttatgtatgtgtaaagagagatgtttcattatttgtattttttttaaagaattttacaaaatatcttaagacacaattagatggtattgacatttttaaatgttgttaagtggttggttgtgttataatttggtaaaaatagtgaattttgagtttataaatctaaactaagtacgtgtttgaaaatatttagttgaatttaacagtcaatccatccttccctttccttctacatttgtgtatcgagatgtgggaaaacttaagtttagaaaggtgtaaatagatttccaagtacaccctaattcagaagatccattttataatttaacttattttaggtcataccttaaaaatttaagctagttgtttagttactatttttcctggtcatatatatcaaatagctcaaggaaggaaaaataagaaagaggcaagagacactgttttcaataactcgatgtcaatgctattaaagaaaatgtatgaaaagcaacgcctttttgctttactaccaaaaaagatcaagactttttggagaacacacaatgaatctcaagcaattctccaagcataaagataatggcaaaaaccttgggtggatgaattctcctctagtaattcacttccattgctacccccacctctttctaggcattctatgctattagaatcgctagtagtttccaaaaagactggcttgaaaacaaagaaagcagggcctaaaccaaggtcattggtgaaaagccaatcatgaacatcccaaaagatttgcacaggcaaattattcaccatcactatttcattccctctgaatctccaatgcaagttcattattctactggccaacatcccatctatgttaatccacatttctggatcatcaggcccagaaagggaagtctcaatcacaacatcatgttctgtcttaccatcttccagaatggctctggtacaaaacattttcttcccatacacattgtctctcttgcacaacaaggtagcctcatctagggatggttttgatttggttctttcataagcatccttctccaaatctcccaacaacagaagcacctctttcttgtaaaccaaggcaacgtaataacccgagcaaggctgtggacttgtggcggagaattctgcatgccgaaaatcccaaaaaatgtctactcttgcacctgctatttcaaatgatctaagaccctttttaccccaagattgcccggattccaaatcaatcttgcaggtgtacttgttctcttccaaagtgttgtcgatgctcatggaaaggaaatgattcgtggggtccttgcaccatgaaactgttatacttcgtaacaattctgctactttggtttgataaacaaaggtgacaaaactctgaggggcatctattttcgtggctttattatccttgcatgttgttttcttcctggaatgtggttttggaatggctaacatcacagattctataacttggacaagtctggattgagcctgcaaatgtatatgattttcttatcttcttgtaggatcgaaaattgatcctctttggcctccaatggtcaaagagaattataattggtaaacccatcaaagatgcttctaacaatagaacaatgaaccatcatcttaatttcacgccttgttgattcaaaacacgaacagcttcaaaggggttcttaatcaaaggttgaatgactaatgaatctcaatgttgagaatttatgtgaaaattaagacacgctttgaggaacaaaatctaggttgtggttgtcaatgagatgtcacgagaacatatgatccttttattgcttttatctattaatagattaatgtctctctcaaattgaaagatgaaaatggaaataagttgcacttataactttaaccctactagagccgctttctgcattattttcaacctaattaattttagtaagcgtcatatttggaaaaaaggcatcaaaggaatgtgctggtcgagatgttatcaggtactaatatagcgtgcttttagaaaatccttccattgttattattattttgtaaatacattaaattgaatattatgacgaggttggacttaaatttaatatatggggtttgctaatatgcacacaccacattttcagttggtgtgcattagtaaggtgcaccgaaaatttagaataacaactgagatagttccatatttatgcagaggatattagcaaaaccgtgttgtgcaaattagcaaaacggaagccgcgattgaggatgatatgtcgaggagggtgcagtgcagatccgaaaacatggtgagagaatttgtttaggagagagaagcacctaatatattatgtcaaattactatattatccctataatgagtttattagaattagaataaaagatatagttggcttttctggcctaaattttttatgcaccttgctatactaactgaaaaattggtatatccatgagagaaaaccctatatttataatatattatatttaatgccaaaagttataaaaattaatttaatattctgatgagattgaacttaaatttatttctaaagcaataaacatcaattattatattggaaatcgtcatcttgttgcctcaattcctggttatcctttgaccatttcctgtgttttggcattgaacaggttgtgagagagagagagagagagagtaaaggctcctcaaaatatttcaattctttttatacagtctctcaaaatatttaaattggtcaactagttcaatcaatactagtgccctgagcattccaattaaaataaaggaccggaaatacattcaatttagtttggctcagattgacctaaccaaatttggtcaaatatagtgacccaaactaaattggcccaatttgatcctatcaagttttttttttccccctcaattcctatatcatgttaaattgttaatagttaatcattgaataacatataatataatcctataatatatatttttatctaataataatatataataactaattattatcatattaatcataatataatttaatatttatatgttttatacatatttaacaaacttatttatgatcatttgataacttttgtatttagtctttaaaaataaaagttttcttaataatttaataataataatttatagtaataaataactatataatattttatagttagtccatgacaataaatttaattttagagtgtaaaaatatgaattgatgacattatattagatacattatatatatttttaaaaatattaatatatataccggattaataaataaccctccaactaaacatctgactcactgacctaatatttcgatgtcaattttcataactattggttgttagttcttcatttttataaccattaagtacacatgtagcgtcctatagagattataattcaataattccatgggcgagttacgggagtataaatataatttgactgaatgtgaaacatgtatacgctaaagtctgaacgttgatatgaaatggaatgctaacagtagaagctttctaaaaaaaaaaaaaaaaaatacaggactaatttgtaaaatatattaaaaaaatacaatattttataattaaaaaaatattcaaccttgtacaattgtaataacaagcttctcaataaattatttttaccttcttccattacttttgttgaatttgtaatgggaagctgaattcataaaatgcagtaaatatacctcttatcaatgtagcacaacacctcaagatttcagaagtataatgacatccaaaaatttaaattacaaacgagcaacataacacgaaaacagaggaaaaggtcgcacaaactgacctcgagacctcagtcaacaaaattatgtgagccggcactccaacatgcacatcaatagttgtcactgtacaaaaataaataatgtaaaaaattatcaaattttaacttgaaatcctcaagagaaaacaaaaaacttcccacgtggcgtagatcggctccttctaaattcaggcaatgtagtattggtgccttccttaagattgcgacctgtaccatgtagtaaaattttgttttcaactttgctggacaataaaggctcagctgcttgcattattcctctacatgtgacaataatactcatttatcaatcaagctttgaataatgtcattttcaatgagaagaaacaaatcaacgagcatagcataattttttaatgattctttaaggcataccttgatccaatgttctgagaattcctagagatgttctggtgtatctttttaatatttacaacaccattgactgcagactccatgaggcgtatatcattttctggctcaaaataatcgtttttccgaagtgcctccatggtcatttcacggccaatttccatgtcaaaaccaggtatcatatcagccttttgaatcctaaagggcaattgctgaaaatgcttaaccttggccttactttcagccttgttgttcctagtaccaccttgtcttactgaacgaggagcttgcttgattttttcctcttcgtgttcttgatgaactttcctggagtttaccttctggaggttgaagagagtttcattagtgttatcctgcttcactggctcctgtgaatgcagattcacccttgaattattctctgtagatgaggccattggcattgtgacaagcgatttatttactagtactctagttggaaatggatgctttaagattggttggttgtctgatgtgtcacttttgaccttgcttttaatgacagaccctctatcagtcgatattgatctcctcctgactggaggtgatggtgatctacctttccctgagctcactaatttttcttcagctagaagagacatttttggcatggagtccttctctataaatgttgagggaaatcttgaccttctttgcttacccgaagaacaagttttagcctgtaaatataatttcagatttagagagtacaaattacacttcattgtgatacaatttcctaatataattttacacaaatttatcattaaagtttatataagcatgcaataacctcagagcttctatcatccatgggtctttgacaattttcaggtttcatgttgtcactggtaccatttttgggcaaacggaaaggtgaaacagctcttggtgctttctgagattctatggtatttcgtgtattcccagctttccattgttgtagttcagtttccttcctctccaatgctgatttgatatttgatatctataaaatgctcaaactgttataatgttggctaaagttaactttaaaattgctatagttatgaccaaaaaccaaacctcttcctttagctcccgaatttctccagtttctttattagattgagcagcaccaagttcaatggttgcaaccctctctgcaaacttaagtgtgctaattgtttctccaagagcattgacttcaggatttatatgaacaaacatcaaagtttttgcatggccacctattgatatagggggaaaaaacacaggttaagttgttttatacagaaattaaaaatataaaattactatggaatgatccaaatacattaatatcaatatttaaattgcaattcattaatcaacccatctcaaccccttcccaactaaaaaacaattaaaacaacagagggcaaaaatctgtagtagaaaaagatggtggttgaagctgaaaacgaaaacaatcccaacttttaagtttgttctagccaattataatgaggaatgtgtacagagagaaaaaaatcaatttaagtctgcttgttacctaatgaatcttgtagaacttgtgtgagcttgctatttctataaggaatatgtggactcttatgtgccaaagcagagataacatcaccaagtgcagaaagagatttatttatatgctgggcctcctttagtctctcgccaacagcctcagatttgtccactctctcacttccagccaaatccacaagatggagacaacccttaagagtggagttagacactaagtccctccctctgacatgaactgtcaacacactgcaattggatggtaaagaaatttatttaagaaaaatatattatatggttaaagtagccatcaatatttatgaagaagaaattttacctatgagaacggctgcttcgctcatttagagctgtagcaccaacagcacgattcttctgaccaattttcattaaatcaagaacatcttgagtacaattaactgggactaaagatgcatcaggcacattaagaccattcaattgagagttgtttcgtatatctaatgtatgtcttgttaaggaaatgaacaagccaaaaaaatatatcatattgttttttttggggggagtatgcaaaaagttttgatatacagaagggaaaaatgattacaatttaatagaaatacagaaagtatgggcttgaaggatatcttctgttagagccatcgctgactaataaatctctcacttgttcattgtatatttcaatcatctggacgcaaacttcatattttatggcatctgctctttcctttgaaatatgaaataagtcacgcaaagccctatagtttacaccccatgtctcttcagtcatcagatcagggccactctatccaagcagtaaaacgcacatgcataagaaaaatgataagacaatattaaaatgattttgtgatatcacactttcaatgtggttaaggtttgatcaagtccataaataatacaatcagttttctttgtgctgatgaaaacatatttaataacatgcaggtctttttaaaattttaattgtctcctttttaagaagaaacatctccaaaccaagataagatactattaaaagaattgcgtaccataacaaatcataatattcttgatttcaagtatccataacatgcaccacaaacagtggacaaaaatctacatttttctactagtacatgaaaagaaagtcaccaatttcagtgcaaaacacataaattttgatctttcttatgaggcatgcaataaaaacagagaatttagaatgaggacaacacttcaatttaagtaaatgcataaaattgtgatagattgcttctatgtgctagaatttttatgtatgtaatgttaccattgtgtaggtctttcctgacccagtctgtccatatgcaaagatgcatacattataaccatctaaggcggacctaaccaatggttgagtgtcagcatatatttgctctgcacatgacaaagaaaaatcatcataaaagttttgactgagaagatataaatttcaaaaaagattattttatttgtaacaaatacattacataagatatcatgattattatcatttaacatccagtatacaaatactcgtttttgttcattcttcattacataaccaaatctctattatctaaaacaacatgtcaaaaaatgtccattattattttcaaatctttactacattttacagagagtcatttaggaataatcacatagaacaaagtatttgctggccctatacattttgcaataatatgtcaaaaaattaaaataccttgggtggcacttgttgcaaacaccttattgaatgaaaatacccttctagcatcttttccttgcttatggggattcataatcattatgtttccattgtctcctatataatctacagtagattgtccatttgattgtcctggtaagaatggcctcactctgcagtagaccctaatggctcctgtaaggaagcaaatctattaaaatacataaatcatgtaagtagatccttgaaaaagcatctcggattcttgtgtacctttgagatcttgtacttgattgtaaagagagcgattctcctccaaaactttgtggtaggaagaggaggcctcttcaaggctctttatatgattctctaagtagtacatagaactcgacttagcattatgaaagaatattgcattataaaagattttacatacatgaagaatatttttcatggaaaaaaaagtctttggatcattaccaagccttctcaattcttggtcccacttggattgaatttgtttgacctccaattttatctcgtcatataagtacttcagtttctatagaccagggaaaaaaacaccattacagtgaatgatgctaatctaataccgcatgataaatcatctaaagcagtacattgtatttcccaattttatacctggagctctttttgctgggcatcacttatttcagcatgcttggcagaataactgacattgtgctgattactatcgcgttttccaccgtaagtgcatagtttagagaattcatttgatgccaaactacctctttgatttagatataatgtgatagcttctatgaattctctcttggagaggcaaccagtattgcctttcaatattttcttgaggaaatgtccaagctgcggacaattgttaaattttaggtaaccttacaaacactgaaagtgattttacattacaaacgtgatagcaagacaaaaaagatgcattaatttctgaagtacctgagtgccttgagaatcaagcaatgcagaaaaatcattgacaaccttcctgagcaaagtatcaattacctacacaatttcacccaatcacaaataagattgctgatcacatgaatcaaatgaatcttcatgcatatatttaatttctcaaaacaattttcaaacaacaatctaatttgccagtcctaaaaattacaaatcacaccacataggaaaggatcttacctaccattgcattcaaaggcagatcatcaaccccatcagcctctctgaggtaagccaggagaagtttgagtccaaactgatcaaaaacagaagccaaagcattagcagctttggtttcttcaactgaaacctctccagacagatgaagaaactgcgatgactcggtctcatcaacaactctttcagtgcccagtatgttggaagaagaccatttagggaaggaagtaatcctgacagttccaccatacctccacaccccaaccccacccgatagcttccattcataataccctttcaaacagagaatgcagtccacaactttgcttgacgaacccccctacaaaaaaactcaacccctatgatgcccatatatgatacatgtatccaatacgacacaattattctagaaacatataggatacaatacgtataagatacacatatagatatgtataaaaaatcataaaacataataaatatataattgcaattctacaaatccaaattaagaacatacttcttatatattactaaaaacaaaataaaattataaatgtcagaaagagagatgagtctaacccaattctacgaaccaagttttaaggtgaggattactccccatttataccgtgtatctcggcactaactttagacaatgggagacttcaacatgtctcccttttgcccacagctatccgccatgtgggactttcaacacacccctcagtctaggggtgaccacaatttaggtggtttttccaacaataaatcattgtaatcataaatcacttcctatcctattgtctacaaataagaataatttccatctttggttcatgaaagagacaatgtttcttgaaattcatgcattggacatatacacatagccatagtgaagtatccaaaccgatacgaaataaaagtatcggtgcttcataactcaaccccattaacaaaatagagcaaagttagtatcttgacgtgaaaggggaggagggtcatggtcaccttttccaaatcggaagcttcgaaggtcaaaagcttcatgtcgttgacggcttcgagaaagtttcgcatgttctcgaaatactgaattgcggactgggcgggtccctcagaagactgaacggcgacgtcgtcgaccaccgcattgtcgacaaccttgacgacagcgccggggttgactctgttgaggacgttgcagagaatgagaccgttgcggagtgcgaggcagaattcctcttcggagggttctttggagagtgatgaagatgcgccattgtccatttgccgaagccattctgctgctacgtacctccttgaagctgatctcacaagcacaaacaaacaacatttgaacaactaacaacaaagacatggcgggtaatgtccaattgtctatacgccgccgtttcatgcacacttttttattttttttacaataacacaacattttttttaagaagagaattgatggtttattcagatgtgctagataaatgttgtgaattattttataataaaaaaaaacaaaattataacttaaaatcttgtacacacttcccaattttcacattttagaacaacttttttttacaacaatattagaacaaccctagtgatagtctttcaatcaaaatttcattaaaagaattttaaaattgaaaagtaacgctattccttttataaaaaaaatcatgtcaaacttgcgttaaatttctttgaggaggtataatggtgattcataagagtaaataaataaatttaacatgtctactctcatttcatactcaagaaatgttacccaaaaaaacaatattctctcaagaaatgtcgtttactgttatgcttttatatttgtgaattctgattaaacaaaggtcaaagtttgaattttaattaatcaaaggttaaagttaaagtagtctagtcacgattgttatttacagcagtgttgcattaaatgggtaccaaaatcatggtgtttcctgtttgaaattaggccatattactttttgaaaagaataattaattgtaaagtagtgtaataaatactactgtattaacttgactttatttgaataccatataaaattacttttaaaatagggttataaatttaaaagaaaatattaaacattcttgatttaaagttttacataaataattaccgaaaaattaaaaatagataaacctaaactaaagtcagttacattcggcagtgaaagaaaaatgttaccccaccaatagaacaagattttggtgggtttttaaatctgaatttcaagcagtactagttcttaaatgaatagttgacatgtatttaaacgaccaggcttaaatcacaaaatttgaataacaacgtcaaagacccacgccaccattgaatgctggtgtgctgggggagtgatcccattttagagcaacacaacacatccccaggcattgcataatgcgctttataattttgtgctccacgatcttttcatttgtcctctgtccctttctttttctcttttccagcctcacttcgtttaatctagttacaataattattcattatttgtctttgtttttttatacaatacttttttcccttttcccttttcttaaacaaagcaataatgtgcaagtgcaagtaataatttagtagatagaatagaaaagaaaatgtaagaaacaaatcaatttcgctaagaaaaccagaggaaatggggaaaaaacaaaagaaactttttctatgactataaagaaacattattataatgccaaaaaaaaaaagagaaacattattgtgaaacaataaaacgttgttctctttttaagggtgtttttttaattatagggtatatttttaaaatgcgtatatatgaaaaatattattaaaaaaaaagagagtagtaaagatatttatgttcaaataatgaaacttttccaagaaatgtgcctgaattcaagcaacaagcatgtttcattatttaatcttaacagaagattaagtctttttttgtggagtataagtctcacttgttcattattcctaaatgggtctttggatttattttttttagaagaaatattattaactacttcaaattaaacacagatagtatcagtgctttctagtttcagtgagctctaaaactaagttcttactcccctgttttggttcaatcttgggggacaaccttaaattcctatgctctcaaagatattattttcagaatacaaatattaaaaagtactacctgataaaatctaagttcccaactcatagtttatttgtgatgaagcattaggtgacaattacgaacacatagcgagtgtaacaagagaacagtgctaatgtgcgatgacataatcataatcaaagttgatacctgcttcctctgcttttctctgagccaattcatgatcgttgatggtatcctccgtcaaactgtgtaaagtctcattgttgttacatgctgaagccgccgaacctttcaaattcaatcctctcttaagaggagatatgaaattagagtttggtaaggtttcctgtggcatgtttcctgcaacaccaacaattggagaaatgcttcaatgcagttcttaatatactattagaatccaaccaccgaaaaataaaattcaaattgttttgggtttaaaaagaacttggcatttaaaatacctgggaaagtgaagctttgggttatgaagattggatctgaggcagaagcgtgaggagaaacagggttctcgtggatttgatttgatgatgaatgagcgttaaaaaatgcgaagaggcttatattaaatgcttggtttgaatgtgttgagagttgagagagaaacagaaagaaagagaacttaaaacaaaacaaaaacaaccttaaacttgaacttgcattttgaacgttggtgtctccgtcactcccgtgtcctcgggggatcacaacgtcttaacggcgtatgtatccgatgtggcgtctgattaggtggcaactgtggtcctctgtgggacccaccgaacggcacgattcgccctgaatgacgtcgtaccaatattgtttgtgcctttcataacttttttgctccccaaaatttgctttcttttaacttttttgagttttgttttggttttaaaaagaaatagacacaattaacacttgggtttcaatcttacaaatggaagaataaaaaatataattgaaaagagagattatggcaactgtggcctgttgtcaacttaccacagttaaatttagtttatttctgtaacttaccacagttaaaaataaaaattcatagccaagagagattacgggacccattgttgacgggaataaaggcatatgataaaactatattctatccaggacatgcgttagatgtggaaagaaacatgagagccaaaatgttccaaaattcaaacatttttccgaacgttgattccccaatttagatagggtagatgcttgcttttttatttattttatctatttacatataaattagatttttgtacaagtattattgtataatttaaatttaatttattattttcatgtttttattatttattatcattgtttaacttctctaattatttagttccgtccttttattttgatgtttaaattatctattttttaccgtttttttattaatttctctaatctttttaatagtgcccacgcttctccttctgcaaatgttagacatgggcctctaaaattagttcgagtagcaacaactctttcatggtgatctcggatgcaaaccctctaatcttagttcattgttttaagtcacataaaacaattcatattattctgtttatttttttatttatataaaaataaaacaatagcttaagccatttatttctttttaaaaaaaataagaattcatttttttattaaagagcaaaatattttgctaattaactaaagtaattaaaaaatacattaaattaagaaaactaattacaaaaatctttaaacaacgaataaagtattttccattgagacaccaggtctgtcggtccgtccacattccaccacttttttcaagaaaaatttcaaagaagtattgtttttattttgtttagtggcagatatttttttaaagttttcttgtttaaagtactgtcagacaaaaatatatttttactatatattttttttttattttgtttttgaatatccttgaagacatttaatgttttgcttttgggtccataaaattatttatttttgttattctagaatgaccatcttgggttggagcatttgatacatgatgcttataagggtttaacttctcataccaggcaaatttttcatacacccaccatttttcataaatgacaataaagtccttggtgatttttaacatacatacaccagcctcaccttttcgccattcttcttcttttttcggtggttttctactcttgcgtgctgttgttggctgctgggtgcgtcttgcattgttgagctggttgtggaggtcgtggctagtgttggtggaggttgcgttggccggttcgctgtcggaggtaagctctgcaactcaagcactgacggaggaagctgacggattggcaatccgtattgattttacagattggcaatccgtaaggtccatacggattgacaatccatatgactcttacggatcaacaatccgtatgagtcatatggattgccaatccatatgaaatcaaatggtgtatgttggtatgtaacttacgggttatgagaagggtaaaattggtattacactgtgcatgttgggtgtattgaaaaaatgaatggtgtagaaagttaatccctgcttataaacgtttcaggtccaataacatattcctggtgcaatatttgttagagaaaatgttcaaattagcacctaagcacaagaaactatttaattcaattatgacctgtgggcttattctcctaaggacataactattggcaccctctcaattactatttaccacaatacattaaaaagatgcatatacccttattccttcgtacccctcaagacacaccttagttagaacacccttcaccccttttccctcacttcttagtttttcttctaccttcttgacccctttattgtttttggtgtcacgcccccttttccaatccctctcttcccccattgaactttctctccatcacactctaattttgttgaatcaaagtgttttaaactccattgattgtgacttcacaagagagcatttcaagctccttttttccgtcttaaagatttgatggaacttgttttcgttatatacctaaatgaggcgcacaacaaaaataagtttatgtcatgtacctaatcaaatacacaacataaataagttttacttgtgtacttggaaatcaatgtatgtttttatatgtttattaaatttatattgatttgcaggtttgttatgttgtgtacatcttatattggacacataggtcaagtgggctctaaggaggacatgccaaatccatcccaagttgaacgagtaccactgagagcttcaatttgtagacataaggctatggcaacacaataagagtgacaagctgccatggctaatgatacaaagcttgactacattgttgagccaggttgctcatgcatggaggcgcaagaggcatcataaccaattttaacatttattaatatttttttataattcaagatttgatctaactcaattctacaaaatcaacttatgaggtgaaggttactcttccacttatatacttttatttgtcaatattattagttgatgagatctcaagcaccttttctcatgtagaagactaaacatctcaaatgtaatatttgcatgatttaacatttgtaattggcctaataatgactcactagtgaatgactcaataagtccaacgataatcattgggataaacttacatatcatcttacaattgaagtttcagtctaactcaattgtacaaaattgactcttaaatgtaagttattttttacttatatattttaatttagccatattactaattattgtggaatcaccttttttttacataaatatgaaaatattacaacttatcttttccataattttactttattgatatttttattatcaaacttaataaatataaagtatgaataaaataaaatattaatattttttaaatacaaaaaatcttaataaagggaaacttataaaatacatgtacttattttaaaaggaaaagaaaattcatacattaaaagaaaatattacataaataattgaatgaaattaattaaaatcataaaatgatattatctctaattctatatataagaaacatatgatgaatcattaaaataaaataaataaaaactcacatttaatgttatcatagattcaaattttattataaaaattcttttaaatttgaatgttgtaagtaataatcacatttaatatcagtattcataatttaatgaatgaatatctagtaaacgaaattaataataaattaaggatatagatgaaagttaactctaaataaatttaaaattaattatttttagaggatttaaaataataatttttttataattaggacgaaagataatatcaatctgttgcttacactgtccataagaccagagataacagtagtactccattaaaataatcatgccttataattatttgactaatacaataattgatcatttgatttaatagtatagttaaagtgttaaacacaagagaatactctcgatttcaacaatttcgattttcaaggcatgattgaatcactgtgaatcaggcccgagacgtggatgacaattagtgggacccaagtggagacgggtaaaatgagaagtaagacggaaacgacatgacgtacatcaagaataatgtcatatttattttataacaaacaaattacaaattaacaattcttttattttctaaatattgtatacaaaattcaattagaatattaaatacacatatttattttttttatgaataaataatatattcacaaataatagtacaatcctttacattatattcaataacaaattactatatgtaatttattgatttttaataattaccttaagagtcataaaaaaatattttttattatttgatgatataaaataattatagtggctacggatgtttattaatttttttatacaattaataagtttaattttgattaatttattataatttttcattctattaactaattaaaaattacacttaaaatgcttattataaaaaaattaattttgatgtatagttagtcttaaattttttacattaccaatgaattaaaaatcatcataaatatgatttttaagattattaatataaaagttaacaaatttaatgtgcagttcataagtaacaataatgtaaaatctccttcactggttgggaacaatataagagaatggaaaaaaatgaagtatctattgaagggatgaagagagaatttaaataatttaaagtgtcctaagacgtaaactatcccaacgttttaaatttaaaattataactgtacgaaagtaaattaatctttaaaatttcatactctcttatgaaccaaataaaaaaaaaggctacattgatctccttcctttattaaaacctttcttctcccattgtctcacccaaacaaaatgtctaattaaaatccctctcctctttctctcttcattaaaatcctttctctcctttgaaccatttggtctcaattagtccctttatattgtgagagcatacattaatacactatttactataatcatttagtctcaatattaattagtccctttgtgttgtcgtgagagcatactttatacactatttactatatatatttatatatatatatatatatatatatatatatatatatatatatgtttgcacaatggatattctgatagttaaaaagtaattcatttcttttaaaatttagatatcactgaagtaagttttattttgcataagaaattatttttcaaacacaattagaaaaaaaataatcatctttaacactcacttcctctaaattcaaatggaaacaaaattaataattttatactatttaaagttgttagttaatttcatttaaaaaaagaactacattttttaactacttttaatcatattaatggaagataacttttacattttaattgaattaagaatattcttataataataacttaaataagattaaattagttgatattaagtcgacgaaaaatattattttgctataattcagttcattaaattggacattcatttcttaaatattttttttgagaggtcctttcttatatttaagtccataaaaagtatattttttgttgtaaaactattgatatttacgattaatatacgagatatcgactagcgtatcacaattttaaaaaaatttacccaaatgtcacgcggataatagtattttccatactgtcacgccacctatttcactataaggcccagcgaaataagtagctgatgtggcacaattttgttggccgcgtatttcgctgggggccaagagaaatacgttacaacgaaaaaaaaaaacgttggaacacgtgtcacgcatgcatgaattggtggtgatattaattatataaatttcaaacggtctaacttttgatagaaatgtccgatcgagatgtacgatatgtcaaaatgctcgaaattaaaagaagtaattaaaaaaataaaaatagcattaaattaaataattaaataattaaaaaagtagaaaaaaggaattttttggatgattgaatcctaaatcctaattttcacatacttcgaggcattttttggagaaaaaaaatagttgaccaaatcccttttaggaatttgtctagaccttctcttctaaatttcgagcgttttaacatatcatacgcctcaatcaaacgtttctatcaaaagttatgaccgtttgaagtttatataattaatatcaccaccaattcatgcatgcgtgacacgtgttccaatgccacatattttgtttggctctagcgaaatacgtagtgtctgccacgtgtcctacccgttgttgaccgcgtatttcgctagcctttatagcaaagtacatgacaaacaaaattgtaccacatcagctacttatttcgctgggccttggagcgaataggtagcttaacagtatgggaaatactactgttcgcgtgacatttggatgaattttttaaaaaaatgtggcacgttagtcgatgtatagtatattaacctagattaagaaatatttaataagaataaaatattaatgtatttagttagtttaaagtaagaataaattaaagtataataattttaaaaaggaggtcatatattaaatgacatattaaaaaaatgtgtaaattattaaatatgaataaatctaatctaattaaattcatactatcagaaatgaatttaaaataattattgtttaaaaataatgaaaggtgtaaaaaaggaggaaaaggcattaggcccgacatgagattcagtgtcaaggtggatgctcaaaatattagatactgcgggcgtggggccctcaaacagaagacagtctagtgagtgacatttccacactgaaacatagacacattaagtcattaaccacaccacacgtacccaccccacactcccctgtccctgtccctctaccacttccatacccatacgctacgtatactatctgattttccgtttctctaatctctaccaatttccaatacgtgttcctacacattgttctaagaaattaaaaaatatatattttaaaaattattatataaaaatatggtattccatgatttatttatttcatttttaaaaaaatacacttatggttgtgaggaatattttttttaattatgatattggtgtgaaatatctatcaattttgataatgactaatttttatcgaaaaatctgattgatcactttaataggattttttctcttaaaaatatttttttattcacaaagtttaaatctgacacctcatttatggtgaccaaatacaaaaatatttgcatcaacgatttgttggtattataaggagtattttagatgtgtttgaaataatggtaaaaattagactatttgaataatcaattatatgtttagttaattatttgtataatcaatcataatcatgatcaatttttatttgagtaattttgttgaaaagtgatttaaaaataattgatatttttgaatgcaacaaaagattagcttttacataataaaatagtataaaaatagccgaaacagaaaataagctgtaaaaacatcttcttttttttcaattttttcttcttctaaatttaagctaggatcccaaacaaacaaacttattttagaaacaaattattttattaaaaaactgaaattatagattataagaagattaatattctttgaagagctaaaggttttaaaggtaagttgccatttttgacttgattttctttatgcacaaaaattaaaatttgagcccttactcccttagttacttgctcaaggaatataaatccatcaccacttaacttaacccattgcttgttaatcatttgtttaaaaacttaattgcacttgtgattttctaggtattgtacctaaaccaaagtaaaataactagaactcaagcttttgacctactggcaattttttttattagttttataaattaaaaaggcctcacatattaataaaaaagataacatatttttaatagaatgtgttgcataacattgacgtgataattgatatattgtctaacacatatgttaatatgacttatgcatttttaatctctcacaattataaggcttgatagactagaagtataactaagctatgttaatataagtgtaagacaatatgttaattgtcacttcacattatcatcgtcaacttatgtgctaccgtaccaaaatttattagggagtttttgtttcacgaatttaattatattctttggagaatacttgtgactcaatttgtgcaactaaaacctataaaccaaaattacacaattaccctgcaggataaaaaatgcaattaatccttatatttaataagacatttaatatttttttttcatttgcattatgaacacattaatgaaatcgatcaatagttttaaataaactttggacattagcacttgtttatattgattatatttgacaaaattagctgaaaagttagttgaaagttagaaaattggaaaattagttatagttaaaaattgaagacttataaactaacttattaaattataagtgtttaataaaattaattattgaagtaatttaaaaatgtaaaataacatttctaaaaaggataataaaaaaattgaataaatatgttaaagataatatatatatatatatatatatatatatataaaatatgctagaagttagcattaaaaaaatattatttcaaatagtattttaaaaaatattaaaaattacttaaaaaaatttagaaattatttaaaaaataagtatttagttagtaaaaaaaaatagcttaaatgatttgtccaacgtagcgcatgcttttgggtgaagcagtgtagtagtttcaattcaggatggaagaaggtggtaatttgaagatcccctgaagatcaaggtctgtttatagctcattgcctcattggacgtcactatatatataaactaaaagaaaagggtaaataggcagcgtctgatagtgcaccaaatagcatcatatctgtctgtcactatacattttccctttttctttctttctttcgctccgttcctctttctctatttcgtacaattctgagttcatcaggtacgttttgccatcgttcagcatttggttatttgatcttctcgtctcctctcctcatttaactggatctggatttcttaactttaaactgcattcattcattcatcactgctatccctgtctttagtgcaatggctgcgctaattcgctcacgttggaactgaaccagttttaatttatctgtttgtttgcactttgcacttcgcacgcaaatataacctctcactgactctggttggatggattgttacgtgcaccgcatggtgatgatatcatgtcttttgttcatcggatcggatggaagcgtgtcatgtatatgtcgatgatgtcctgattaatttgatttgatagatcatggcgtggagagaatgagattggaaattaattgttttgtccattacttgaggaatttagattaacactttggttttattgactaaaaaagcccttggtatatatctagatggctttaggaagtgattttttttatttttttttaatcaataaatgttagttgttagttttattagtatattagtgagagtttggaaaggacttcgaattaacaacttctgtgaattctccctttaaccacaaagctaaccttataattcctgaagtgaacttgatgacaaatgatgcctcctaaagggtgaatccgtcttgagcattgttctactggctagtcttttagtgaaaattagtaacattaccaaagagtgaaatggttggcttgatccaatcagccaaatttgcaagctgttaaaactattgttattcatattcttttattgagtagtatttgtatgttattgatttctctatctgtgattttcaggtattatttatccaggtcattgcctatgggtactaaatcagttgttgacttaatggagtctttatccgaggttcatttttctggatttcacatggatggcttagagcaaagaaaggctggcacagagcaaccaaccacttcagcaactgacatgtataaacaacctttcgtgataggtgtgtgtttttgcattccaagctgcctatgtagtcataaattcctgatttgtctataattcaatgttggtacttggtacatttactttgtcttgtgtttgttgggtatcatctaatgtataatagggtactaaatatattaagtttttgggatgatataaactgaggttctagagcccatatgtggattttgctgttctgttatggcagagaaatctcagcagctttctttttcctccccgcatttgcatatgattccattgagcccttagtttttaagtgaagaagaacaaagttacctttgaagactatcatacttcacaatttattttatcttctctaaaaactaattttaacttgggcataaattaattttatcttatgagaaaattttatttcattttttctttcataagtacttacggagaagttgaaccacataggatctagtccacgttcttgcatcacaatttcatttcagctgatcattcctcttacttggtcatcctacagttggaaattgtggttaactcacacagctaacccctaataatataaaagtagagcttcccgcaaacttacatacttaacattgaagttttctttgtttcaaagtttagacgcacgagttttgaaaataagatcgtaacaactttgtatgtcttaatttcacatctaaccaacttttatttggtatctacggttctaattcattttctatttactttttggtttgggtatgtcacaggtgttgctggtggagcagcatccggtaagacatcagtttgtgatatgattgttcagcagcttcatgaccaacgagttgtacttgttaatcaggtatctaattcttgcaaagtaccaatcatttatctcattttggtgtagattgaaatcataggaagagattagaagaaaaaagaaagataaaagagaaagtaaatgtaataaatgatgaggtagaaaagagaaaaaaataaagtgaaaataatatgaaagagagagcatctgtatgcttgtaataaccattgattttttctaaacgtactggtgaatggtgatcaaattgagaatttataactatatgagtctgtgagtcagatattaagggaatacaactaatagtttgcggttaatgcttcaagccttataagcatcctgtatcctccattatctgaatccccttggtattttgttcggccttatctattggaatgattttatcatctttgttttgtattttcattgcaacattgacattctattggctaccattcaccaaaatttctccacctctttctttttcaagtcagattctgtattatgttgttctaatcacctcttttatcatgaacatgtatgtgtttctccctcaaaatttccatccaaatgtcaatgattttctcaacaacagaacacatttgaatacaccattttttagttgacaaaagtaaaaaattctttggatgtattttctaacatttatgctgttaagccatgttcaatggaattgctcttttggcattagaagtgtctagtaactcgagtcttattcttcggatgttggagagcaattttcatgggttacaaataaagcaccgttactatataaagcaactagagttttctactttttaatggactttaattagttttatatattaaaatattagattttttaaaaattatttaattaacaaataacttagatttgtgtattgtttataaattaaactatgttttcataatatattactttatattttttcacattaaaaatattattaatttataattgatttgatttatttaaattattagtacatagtattttccatgtattctaaaaattaattaattaaaaattaatgcaaagttatttggaagtgaacattttatggaattaaaaattattatatatttatttcttactaaaacaaatgacataaaaatattttaaattaaaattaagatgaataataaaatataaaagagcaagatcaattgtggagcctactttttagagttgatagattggagaaattttttattgaattattaaagtcataaaacattatgtcagcgaggaagtgaaaaattataaagtaatagcaactcgtgtgacttgcttgaaggagatgcccttaaccttttatttatttattacatattttacttgttccctttgtactttggccttcttttatcttttttgagggtatgtgttccagaatttgggttgatgtttcttattgtacatgatgatacgttgagcgtaataaatgaattatttattgtacaacaggattctttttaccataatttgactgaggaggaacttacaagagtacaagattacaactttgaccatcctggtcagttcaattgtacccattagtctctcattattaatcagtaactttctctttacattaagacattatatagcatcatcactcaggagaggattggataaaaaagtccggagctacatcaaaatccttctttagatagtcttgtttttattgtttaggccttgtcttgggtccttttataaataaaaaataaagagagagagaagaaattatacaggatgaaacatgcactaaatttattcggatgcttgttttatttcctttattttaaatctacttattctcctatatctggagttctgtttttcctaaaatgcttttcgaggatcgggttagaaagcctaaaataatattcaggttttagtattgttttgtttttatcaggtcttatgtttttacgtagatacttaaatttcttgcaaaacaagttcaatacattcaattagtatcaactccatctttcttactctcagaatgcttcaggaatatcaagggtggtgtcagggaaaaattaacctttgaaagatgtaaagcagaatttacctcaaaattaactgattagggacatgaaagtgttaatgaaattccagagctagaatattctcgcatttagcctagagatgagtatggttggtgagaccactgcaaattttacatgtcagagtgttacaaattgtgttatatgcattatgagccattccaaaggttgaacaaaagttcattttgtatggtacgatacttgagtacctagcaagcataattagtataatacacctaaaaactgataaggtagcaacttttgatatggaaattttaacgtttaaatttttttatatatgtgaataatggttcttagactgctatagctactttattcctaatgtatgttgttgatgtcatcagaagcttttgatactgagcaattgctacgtgtcatggacaagttgaagcatagccaagcagtagatattccaaagtatgactttaagggttacaagaatgatgtttttccagcaagacgggtatatggaacattcaactttttagtagtaactttactcctcgttcttgaaatgcataacagaacaggccaagattataattttctattttgagtttttattatcatgctaaagaatagttttttattgcataggcttgagatgacaatgattttcgtagttgaatatgaatactttgatgtactaatgattgccaaataatgcagtacatgtttcttcttgcgttttatctccattagaggggaaattatatggaatacaatttcagccatacttcccttttatgttggtttaatgtttgccgatcaaaaaaaaaaaatgttggtttaatgtgttttgcaggtaaacccagcggatgttattattttggaaggtatccttgttttccatgatccacgagtgcgggcattgatgaatatgaagatatttgttgacacaggtcccttattatttaagttccaatataacttttataacttactgtattgtatttttctgcggcatttcttactatatatggatctgttgtcagattcattttccttttagccccatggacttaaatttcccccctcctaatccacattatgatataggagaacgcatattcaagttatgctaatgacactatcttcatctttttttccccacatttatttgttggtttctattttattaataattgcctacgtcttccttctaactatttacaagcatgcatattttatatctcgttgttgcactactaagttatgctatcactttacattgtgaaatgttcagtgcagatgccgatgttcgtctggctagaagaattaagcgtgatactgctgacaatgctcgtgaaattggagctgtgcttgatcaggtagctaccgtcagccacaccatttgcacttccattatcatattttgattatcttctggtttttttgccttcacgtttcttacttgtactgcatttcaagacttggaaatgttattttagttcatgttgctgagaggctgttatgaaatttcattgattagaaaacatgtaagaagtcagtttttatgaaattaaatctttaatgatctgttttaaggttatgattataaatcaagctaacatatttcctttttttatgtttaccatatattagtaattccatttttttgtttaccatatattagtaactgtttcttataatatatacttgatgcagtattctaaatttgtgaagccggcttttgatgactttattcttcccaccaagaagtatgctgatatcattataccccatggaggagataatcatgtggctattgacttgattgtacaacatattcgcacgaagcttggtcagcatgacttgtgtaaaatatatcctaatttatacgtcattcagtctacttttcaggtacccctttcttgttatttatcgtctttatcaatcatcccatctttccccgttcatctggaacatccaaattcaatttttttatattaaaagttgaataatcacaataattgcttcgatgcagatacggggtatgcatactctgatacgtgattctcaaacaacgaaacatgactttgtattttattctgaccgtctgattcgtttggtatgtaaatggggttcatttgttgctcttaatattagtgatggcatggcattttcttcaagcattaatggtcaaatttcgcccacttgaccaggttgtagaacatggcctagggcatcttccatttacagaaaagcaagtaacgactccaactggtaagctgttctttttcaatgatggtcgcctttacttgtattttatgtgcaactaaggatgcaatattctcttctcattgcactagaaagtgttgtggatgatgtgcctgttgggtatctctggtttctaaaatcctgccatattattgtcacaaaaatgaggagtaacatgaactacatgtttccagccttgttttagaattgtctatgtcttagaccacttgaaacttccaagttatccaagacatagttagacataattcagccaagttggaaggactacgaataacttctgctgtctgaattcccaatctaagaaatgcttcatataatgggaaccaaaggggtatcatgttattttacagtagagagacatgttctgttcatgatgttaatttctgcgattgccatactgaaaatgattaactttcctgtctgcatctttgctgatattctccttcaaatatttacaaaatagaattagtttgtttcacgtcttaacctttttatggttacagctaagctaatacttgtccttcaatgcaggatcggtatacagcggggtggatttctgtaagaggttgtgtggtgtctccatcatccggaggtatcgttttagtccagatcagaagtcacttgggcatttgtttaaatattgttatccttgctacaaagttttgactaaaatactttcttgaacaattcaataaagagaaagatctattgttgatttgggtttataattaccaaattgtttagattgcatatggtactctacttgttatccttgaaaatattatccaacccccctctctatattctaagaaactagttcttctttcctaattactcagtttgatgtgaacctatgatcactgcaattttttataaatagaatttgtccttaaatttgatatgcaatctaatttcagtggggagagtatggaaaatgctttacgagcatgctgcaaaggtatcaagattgggaaaattcttattcatagagaaggtgacaacggtcaacaggtttgtcatttgcgtgtgcttgggtatactgttttgattcatttcatgatcactaacttatcctttttttttttggtgattcactaacttgtcctttgattattgagcagctaatatatgagaagttgcctaatgacatctcagataggcatgtattactgctggatcccatcttaggcacaggtttgtcattctcataatgtttatttttatggtgttttttatgttactagtttaaaataatatacaaaccgtcagtagccaactgcgacttaagttacatagcagttagcataataagggtatataaaaaaattgatatttaatttgtttgttttcattttgattaactttagaatatcttcgtctttaggtaattcagctgttcaagcaatttctttgcttttaaagaagggtgtaccagagtccaacattatatttctcaatctcgtatcagtaagttacttgtgcctgttgttgttcctctgtatatcatatatatcttgccatttctttgttattttctgttgcttctttcttttcttgtacctaatgatttgcatatatatatatatgctctcatattgccaggcacctcaaggtgttcatgtggtctgtaaaagatttccgagaataaaaatcctgacatctgagattgagattggtttgaatgaagatttccgtgtcatacctggcatgggtgagtttggggaccggtactttggaacagataatgatgaccagaaggtggtacccgcttcacagtagttatacttgggaggaaattcacaatattttttggttcgtcatcattaatgagacttttactgcggaagggggcaataaaatttgctgaattaagattctgctggtctcctagttattgttcaaaatcaattttgatcataatcttttgtttgattttacaaacatacgcataatcggaatattccaatgcaaattttgatttaccttttattattataccagaatttttctttgaacttattctttgccggacactggcttatcaagatacatttttactgtccggagatttttacttcatagatataaatgagtatgtaagttctttaattaaatatctatcactctcaaaattgagaatatatagcgagggtaaattgcataaagatgtaacttgaggatggaacttgattctgaaaaaaagacaaaaaaataaaaataaataatgtgactgagacattgttctgcaaacaattttcataagagcctttaggttgatatcttaatatgtaaagccaagtccaagaggatgacgggtgagagctttccacaaaatttccttgttatatatcatgagttgagtggaatatatattattgaaacggatgaggtgccacttgggcaagggaaggatcactcgttgctttatccaagagtgataaccttcgttaggctaatcactggacacgtggttcctttgcatgggttgggtagaataccacttggtatattcctttgagatttttatctatatagctttggtctgggtaaactcctttttcgtgctgtcgtctgttatctgtttcccgccatatatccaataagctttaaccatgtctgcctttgttggaaagtacgcaggtagtatctcatatctcctcttctcttaatattactcacatctctcacccacacgtaaacaagaacaattcttcattgaatgaagtacaagcttgtcaaacattccactttaatgtactgattaacaagaaaagagtagccgagaaatgcatcatattctcattagttattggaacataatatcaaattataaaagattcattcatgtctaagaagctcattctaaatctttatatgtttacaactcttagactttggtttccaaatgggatgtatgttataacttacatcaattccagatgagcttatcaagaatgccaagtacatagccacacctgggaagggcatcttggcagcagatgagagcactggcaccattgggaagcgcctatcgagcattaacgttgagaacattgaggcgaaccgccaagctcttcgcgagcttctcttcaccgctccagatgccctccaatacctttctggtgtcatcctctttgaggaaactctttaccagaaaacctctgatgggaagccttttgttgaggtacttcaagagaacaatgtcatcccaggtatcaaagtggacaagggtgttgttgagttggctggcacaaatggtgaaaccaccactcagggcttcgactctctcggagctcggtgccaacagtactacaaggctggtgcacgcttcgccaagtggcgtgcagtcctcaaaattggcccaactgagccctctgagctttccatccagcaaaatgcacagggcttggcacgctatgccatcatttgccaggagaatggccttgtacccattgttgagcctgagattttgactgatggggctcatgacatcgccaaatgtgctgctgttactgaaactgtacttgcagctgtttacaaggcactgaatgagcagcatgtccttcttgaaggaactcttctcaagcccaacatggttactcccggctctgatagcccaaaggtaacttaacattttcaaaatcatacatccatatgtatggttacattctatagttgaatacttactagtcttagaaataaaattggaatgaagtatagtgcaatattgttgacttcaaaaaagatttgtggacaccttatatgctatttgacacagataaaggaatagtagaggtatgatgaatgatatgacgtgataggaaaagagaaatgattggtgttggtggagcattagtaatttaagggtgtctaaatatcattgttcgatttacttggaaacgaatgtgagttggcaccagtagttaagaatctggtcagttcgaactctcaccttccacataggtatggattcaaatttccttgatgccactttcttgcttggtgtgcaaccttcttcaggaagctctcttggagcttagaggctagttaagtagttgcaattaggtgaaactactggtcttccagttctaccacttttaggaagaaaaaaaaattacatattattaactaggaaaataatttaatttgtgtgcatgcaggtatcacctgaggtgattgctgagtacacagttcaagccctccgcaggactgtcccagctgcagtgccaggggttgtgtttctgtctggtgggcaaagtgaagaagaagccaccctcaacctgaatgcaatgaacaagttggaggtgttgaagccatggactctctcattctcattcgggcgagcactgcaacaaagcacactcaagacatggggtggaaagaaggagaatgttgccaaagctcaagaggcatttctggcaagatgcaaggccaattctgatgctactctgggaaagtatgttggtgggagcggaagtgggttgacttctgagagtttgtatgtcaagaactacaagtattagacttctatgagtgtgtttgtttctccttttaaaaaccttaaaaacgtcaatccatgcttttggttcagtcacgttgaggtctataagaaagcatgacaatggagaaacaaacatactctaaatggacttggggactgatttggggtgggtgcattctggcatatgtatgatacagcctaagaagcatttgcttctgattaacatgcttatttttgggttacatatttttacaaatatcagttattatgttataggagccaattttaatgtcaaatggtgatggcgcgtaccactcaaaaataattgttggagggaggctggtatatattgtcagaaacagtaatattgtactttataaaatgtgcaattacttaacacaggatgatggaaagcagtcaattatattagtccatgtaaatgatgtaataatgggcgtgtactttttttacccgtcgaacattctttagcagcaggtagaacaaaaggaatttgaaggaagaaaaaaaactagaaagaaaagaatcaaagaaaacaaaagaatatttgctcaaatggacatttatcaattatcattgtacaacctagttactgtctgcacctattacaaattaatgtttagcttcagagaattcagataattaattttctacaaattatatttgatagctcaaaatccgctgtggtgttaaccatggataatagtaatgtctcggtgagtcactagtcactagctatacaaggaaattaccgtttgtgtgtgtctctctctatatataaatatttggctcactttagagacattttctttcatatattaacataggtgggaattattattaaattaattgattaatttttgtcaaaaaaatctaattgatcactttagtagaatttttttttctaactatattttttttatccacaaaatttaaactaacactttacttaagaaatcaaatccaaatgtttacactaacaacttattaattgcttcagtgtcctttgcttgttatttatgttgaaggatcttgttgcccgacctatgtccattgtgttatggacatatgaatcctacactcccttatttgaattctaaatgcaccttccaagcaattcgataaagaccaaattagccttaacgagaccacctcccttccccaaccctaacacctcattggctcctacacccaacctaacacctcccaaacctcgaaaagtgtgacaacagctttgcaaagccctccttcaccctccttcctttgtacctttcgaagtccctgcacggctgcaccctcctcactgaaccccgaaagcatcatcaaaatgggtggtgcaggattcaaatgtctggtttgaaaaaaaaataagaaaaactaacgtagtaaataacagctaggaagattctggattaagagattattttagtgcagctaacacgacaatataaaaggaaagtcggttcaaccaagccggcttttctgatatttggggttgtgtccacacaagtgtttctcatctgatccaattcttttgccttgcctcgcaccttctcatctcaaaaaatacgcgtttatatgtgtcataatagagcagtagatttccacgcctccgccaaaccacaatcacagtttcacttgacatggccgatgtaataagttttgctgagctagtggacaattcgataaggagtagtagtgctagtgggtcagatgttggagcatcccctgtccatagttttgctgagctagtggacagtgcgataaggagtagtagtgctagtggatctgattttggagcatcccctgtccatagttttgctgagccaggacatgttgctgctgctgctgcgcaattattcagccaaactgagcttcaagcagccaccaccaatttctcacttgacaacagggttggtgttgttcatgttggagtttttatttaaactccatgggttatgaataagaggcggttaacaattcaaaataataactactcctaaccgctcttgggaaaggttagaaaaataactactcccaaccgttccgataaccaacggttacgatggttcatcgccgagagtcgcgatgattcaacgccaagagtcgcgatggtttgccggcaactcttcaccagggttgtttgttgtctataaatagacacagagacagtcagaaaagaagaaaagaaaaaactgatagagttttgatagttaatcttttctgatattctcgcttagatactagtgcatttccatatcacataactctgtggttcctcaagcattagctttgttcgtttgggctgttgatttgaagtgccatcaatcttcagacgttgatccgttctatcctgggagacaattgttcatcaacctttggcatcaattggagggaacaaattgtcttaaggagacaacattgttgggctcggatcctttcatctctttgcatctgtgtctgattcatactcatcatacaggttctatttaatttgttttttgtacagttgtagtagattatattgttcctcttgactactcagattctgacccttgtgcaattggatatattccaattctaaattaactaatagatccaacaatcttaagacaatttgctttgattgaatctgggttcagtatattctatctttttgtattatatactgttgtctactctctgtacttttgaacgattaatctgtgtgattaatcagtgtttctgtttgatctgtgtgattagtcagtgtttctgtactttaccttttcttctgttgatagatcaactgaattggtaaatttaatacatactgatatatgtgatatgaaatctgtaccatctaggggtaataagaaatattttattacttttattgatgattacagtagatactgttatgtttatttacttaatagtaaggatgaagcacttgtggcttttagacaatataaaaatgaagttgaaaatcaacttaacaagaaaattaaggctataaggagcgatcgtgggggagaatatgatggccccttcgaggaattctgtatagaatctgggattatacatcagacgactgctccttacgcaccgcaatcaaatgggattgcagaaaggaaaaatcggacattaaaagaaatgatgaacgctatgttaatcacgtccggtttaccacagaacttgtggggggaagccattttgacagcaaactatattattaatagagttcctcataagaagacaaagagcataccatacgaagtatggaaaggaaagcaaccatccttgaaatacttaaaagtgtgggggtgcttggctaaggttgcggttcctaaacccaaaaggttgaagatcggacctaaaaccgtggattgtgtattcattggttatgcacttaatagtagtgctagtcgttttttggtttatagatttgatatgtcagatatacatgttaatacaattattgaatcaagggacgctaggttctttgaggatatatttccgtataaaaaggcatatgaaccaagtggcaatgacaatgttaatgttgtgagacctcaagagactacaactagtgttaatcctgtagaggaagaatctagacgtagtaagaggcaaaggaccaccacatcctttggacctgattttctaacatatctgttagaaaatgagcctcagacgtacaaagaagctgtaacgtccccagaggcaccattctgggaagaggctatcaatagtgaaattgaatccatcctgtcaaatcacacttgggaattggcagaccttcctcctggcactaagcctctaggaagtaagtgggtcttcaaaaggaagatgaaggaagatggcactattgataaatataaagctaggcttgtagtcaaaggctataagcaacgcgaaggtctcgactacttcgatacctattcacctgttacaaggattacatccattaggatgttagtcgcgctagcagcgttgtatgggttagaactacatcaaatggatgttaaaacaactttcttaaatggagacttagaagaagagatctatttggaacaacctgaagggttttctgttccaggacaagaacggaaagtttatcgcttaattaaatccctttacgggttaaagcaagctccaaaacaatggcatgcaaagtttgataaagttatgttatcaaatggttttagtattaatgaatgtgacaagtgtgtctacattcaaaatactgataaagggtttgccatagtctgtctttatgtagacgacatgttgataatgggtagtaataatcaaatgattaaagctactaagcaattgcttgccagcaaatttgacatgaaagatttgggaagagcagatgttattttgggtatcaaaatccatagaacatcaagaggtttggctctatcacaggctcactatattacaaaaattcttgaaaaattcaagagtttaaatatatctcctgtgaataatcccatagactctagtcttcgactattgaaaaatactggcaaagctaaagcacaaaaggaatatgctcaagtattaggcagtcttatgtatgttatgaattgcactagacctgatattgcttatgcagtgagcatgttgagtcgctttacgagtaatccaaacatgtatcattggaaagctatgataagagttttaggatacctaaagcacactcaaaactttggtttgcattatgaacagtatcctgcagttattgaaggatattgtgatgcaaattggatcaccggttctaatgatactaaatctacaagcggatatgtgttcacccttggtgggggtgttgtatcttggaaatcgtccaagcagacttgcattgcaagatcaactatggaagcagaatttatcgctttagataaagccggtgaggaagcagaatggcttcgtaattttgttaaggatgttcccaattggtcaaaatcagtaccagctgtatgcatacattgtgatagccaagccgccattggtagggctaagaacatcatgtataacggcaagtctagacatatacgtcgtagacatgataccgttagacaactactctcgaatggaatcatctcaatagactatgtgaggtctaaagagaacatagcggatccattaactaaagggattcctagagagttagttgaaaatttgtcgaaaggaatgggtttaaggcctatcaattgttgatcatcgcggtaactctaccttgatgagtggagatcccacgaactaggttcaaagagacaactaagtcatgatcgactgcttaaacactgtggagtttttaaactcatactcattcctatgacaagaccgtgtatatgagggtaagcataacggcttttaatggtttcttaatctgatgtgttcagatgatatatgtggaggtatatcacaagaaatcacctatgtgagtgtgaagtgagggccgcttcaatgagaacttaaaaaggccgattctctataacacttgcagaaccaggaaggtgtccacggccaaaatggacacaacaatgaggacgagcaatgctagggaaacaattgtgtgtctcctattgtctcggtatacaccataaaggtcgacggttcaaggcatcacgaccaccgattgacctagtatacccgataggtttacactagagaaggttcaaaggtgacccctacctatctcgatgcaattgtttctcgccgaggaatcacacttgcatacatattcatatgcatttagtcatgttgaattgatctcttattcatgtgggggattgttggagtttttatttaaactccatgggttatgaataagaggcggttaacaattcaaaataataactactcctaaccgctcttgggaaaggttagaaaaataactactcccaaccgttccgataaccaacggttacgatggttcatcgccgagagtcgcgatgattcaacgccaagagtcgcgatggtttgccggcaactcttcaccagggttgtttgttgtctataaatagacacagagacagtcagaaaagaagaaaagaaaaaactgatagagttttgatagttaatcttttctgatattctcgcttagatactagtgcatttccatatcacataactctgtggttcctcaagcattagctttgttcgtttgggctgttgatttgaagtgccatcaatcttcagacgttgatccgttctatcctgggagacaattgttcatcaacctttggcatcaattggagggaacaaattgtcttaaggagacaacattgttgggctcggatcctttcatctctttgcatctgtgtctgattcatactcatcatacaggttctatttaatttgtttttgtacagttgtagtagattatattgttcctcttgactactcagattctgacccttgtgcaattggatatattccaattctaaattaactaatagatccaacagttcatggtcgtgaggtcgcaatcaacaagtatcaaatctggagatactggtttcgtaggcctaaatttaccttacaccaaaacatagttatacaggtgcaaatggactgtgatggatgcagaaggaaggccctcaaaattgcggcagtgacaaagggtacctttattttgttttattaattaaaataacttgcttggcttattattaattacaccatgaatatttatgttatgaccaagaatatctaggtatacatgtacttggttggttaagctaacagtgggaagcatgcatggatgcgcaggtgtgaagtcagtgtcgctaaatggagcagatagagataaactggtggttacaggatatgggatcgatatagttaggttggttatggcatttgagaagaaacataggcatgccaaccttttaagtgtgacagagtaacattaccaattccgaggctactctggggaagtatgttggtggaagcggaagtgggttggcttctgagaggttgtatatgtcaagaactataaggattaggcttataaaagtgtgtttgtttctctgtagttgaacgccaatccgtgattcctgttcagtaatatattatattatactttataaaatgtgaaattacttaacacaggatgatatacaaagcagtctatcatattagtccgtaatccgtatagtaatagctcccatacagggccatacttttccccgtcgcacattcttagcagaagctagaacaaaaggaattaaaaaaagaaaaagaaaaaatatatgcttaaatggacattcatcaattatcattgtaccgccgagttactgtctgcactctgcactctgcacctactataaattaatggtttagcttcagagaattcatataattaattttctacaaaattctattttgatagctcaaaatccgttgtggtgttaacctgaaataatagtaatgttttggtgggtaactggtcatggtcactaacaatacaagtatattccgttttgtataaaaagaaaatagcaatggatattccgcatatgctttagtggcctttgagcgaacatatatatgaagattttgattaagacatggttttgggatgtaactcatgtaaggctcaccacaataaaattatgtatacttttgaaatcttagttgataccacgcaatgatcaacctctgacaagtccttttctgcttttaacagtcaaaaggcattccaattagtgcagctgacacgacacaattaaggaaataaaagaaaacagtatcagaaagttaattcagcaaaagcgcgttctggaaaacaaactagtagatgaagataaaatagaaactccacccacaacatattctggtatggaagggcttcaacacccctccacccaagtctctatctacaaataaaaacaataaaatatcaaaattaaaatcatatggtgtgtatatatatatatatatatatatatcctctaatattctctttttcatttctcacaaaaaaaatcatatcactgttttgcacactggtatttaccattagctatatctcctaattaataaagtagaaaactagaaaataataagaaaccacaaagaattctatcatgtttgttggctcttcatcatcggtttgttatgcattgtctggctactagaataccagctggaggactagtcatctctatctggcatgtgctatacagagagtaagataaatggataaggccaatatggaacctcaccttaaatgttccccttgcattgtaattgaccctgttattctccacttgcctttgaagttttacaccaacatcttgcggcaaaaacaccaagcttgatatcaagttcactgattgcaacctggtttcccttggcctttgagtgaaaggcttgattgtttgtgaagacacgagtctgtctgagtagaaaagctcaatgttcaaggactcaaacctcaccccaattctcctgttaggattggaaaaatttgcaaggagagtgaattcaccattgaggtactgtggtgagtcaaagtacaccacattgaggcttgcattgggaatgtcaaacgtggggtttcgcggtttcatggaaaggtagataatcagtgttgcaattccaaagaagataagcactaggctgaatatgaagcacagtattgcagcacaccatataattggttttgtcctttgaagtcgaggttgcccgaaaattgctctagtgttggcaagggaatttggtgcttctgattgctgagaatgttgattccttggttgtattggtgtgccaagttcttcttcaacagaggctagcatgtttgaaaaggtgcactactaaaataggccaatggaagtgaatgagggagagatagaagtgatatgtttatttattctaaatggggtgatggatcaatataagtgaagagggaaaaaaaaaaagcttttgtagttgagtaataataatggaggggacaatgtgttttttttttggtattatcaaaaggtgacacaggtgagctaaagttgcaccacattgatgtcttaatttttaatgtttatgctttttggtatatatgcggcaacgtttgggaaggtgctaaaagaatgacttcaacagagccccctcactttgttgatttcttatcctttaagttttgaatggttttagactttgtcaaatgtgaatgtaaatgagaatagtcagtttgattaagggcttagattatgcgtgtataccaattataccagggtttaactagtgctctttcttctattctatttgaccaagagaaggtccttaaaagcaagttgctgcctggattatataatgttaataggggaaaatgataacttgaagcacctaaaaccaaaagctaaatattaaaattgattgtatgcaagttgatttttttttctcaaatcatgttaagactttgggatgagaaattataatgcactatataactactgtgttatgtactgaaaaccagagataataaatgatgcaaaaattagaaagacgtgagacaagtagaagagcttacaaatctataataagtatttaatttttttataggctaataataagtatttcatggagaaaatttcttccttctatgggtgacgttcattctctatatcttgtgtttgctcgtgggaataaatttttctttcaaaagttgtccattttttttaaaatttatatttgcaaaaattatatttacggaatatctacagtactgtattggatacacaaattaccatgaaaaaaaaaaaaatcttctccctccacaaatgatggtctcttcctagacttccccatttcctagaaagctagaaccgaccaaatcgccgcctactcgattcatcaaaaccacatttgggccagattcggttgggagtgtcaatttcatacttgtaattaactactaattattattttttttattagtagaaaatagaaatcaaagacaaataagtattaaaagtttacaacaatttacattctattttgctgagttaaactatttgacaattaatgaatttaagtgtataattctgagatgcaagaaattgacaaatgaagtgttctgactaatggtaagtgtgtcaccttaatttttaagagatgcgattttgagaattataaaaaattcattcacaataggtacttgtttaagaaatcttaaaaagttataattactattactcctgttatttttacactatagtttgtttttttataaataaataaaaagaggtagtatcatacacataagttattgagatgagaagaacttttcaacttacaagagaaaacatatatatatatatatatatatatatatattaaccaagaaatcacaaaaaaacatattgatgcatctttatattgattcatagactttggtattttaataacgagtttaatgaaatgttgaagtcaacataaaaattcaaaatgtgttaatttaacttcaaaatgacaatggaaagattacattttaacataatatgtgtttgatatttgtcttctttgattttataaattgaataagcaaaaaaaaaaatatttctagttaagcataactgatagttattattataaacatttgagattgtattgtcttaattacaaaaaagtaatcatcgatcacgtgagttaattgacaccagatttttttaacttaataaaaaatattgagtttgagttatgaaaatacaattattatttttatgagtgaatattcaattatattaaatactcggagaaattttttttccattcataatggttttaagattagcatgtaattgttttttattttaattttaagatatgttgaacttttttctagaattttattctagaagtgatttgtaaactcattttcaaaagtactttataaactacttcaggattgcatttttccaagtgatttgatacattgtaaaattaaaattttagaaataatttataagtttttaaaattaaaattttgaaagaaaagttaatagattttagaattaaattgctgaaaataatttaagattaaattgctgaatataatgatattgttcctttacgatttacaattggttagtgcattcgtctgagcctactccctcaggctcttcatttttcttggcttatccgcataaatactctgcccaatcttcttttctttcatgtcatttttccttctttttttatgattaagtaaatagcgaaatacaagagaataatgatgctgaaatttaattaagtacggtaattaataagtatattattttttaaaaattatatttattgcaatcttaaattaataagtatattaatcttcttccaggggtgcctcaatcccttgtttgtcaacaaaaaagaaaaagtatacaaaatttataatattgttattcaacaatgtgttaccacattatttaatgagtttaatgatacattattaaatcaataacatgatttttcttatcataacatggtaatttttctatgctaacattatatatattaaaattaaatttaaagatttattgtctcaataacataattgataattcctttttgtacagtgaagctgtttttcattggatattatcgatcattggtgaatggtgattcattcttcttgtggggcaattatcgccaaggtctcctgggttacgttccaatgttccatgactgttatgcatggaacatgtggtttgaaacctttcgttgaatatacctggaaattagaactaaaagttaacgttgatcacaagaagaattatgttctacaaagtctaagtctttgtccacatcgtattaacgagtaggctttgcttcgaatgttgatagaaagtgaaagaaagtagcgtgaatcgaagtaatattttattaggttttattgtttgaattgaccaatttttaaatgtgataattatattccatatatctcattcaaaattacctttggcttttttacatcttctttttttaaacctaaatccctctttgttggtgatgtccttattctgaagttgtgtatcatcaatttatcctacttaagagtaattttcccccgctgtctaacgcatgatattatttttgttatagaaatataacacattatagttcaagaaaagatttggattttcattataaaaatgtatgtcttttatgagataaaggaaatgaaaaaaaaatctgatattcttatgttttaatattggataaactcacatcattatcaaaagttttaaattcttatttttcaaaaaaaatacataaaaatgtgtgtcctttccctaaacagtttttttttttccttccagcaacgaacgggtcttgaacctaggcacaggccgtccctagatattagtttagttcaattgatttgagttgagttgatttttttatttatatatattttaatacctactgagagaaacagagtgagagtgagggaggaaaggtgaaatcatataacaatactaacatttttggataaagtataagacattcaacacttatcatatgattcatatcataggaaggaaaggatgaacaacgattatgctatgcagcatacagagtggaaactacatgtgctcgtcttccacaatccgcaaatccaaccctttcaacattggcgcatggaattggtatttatgtatgtatgttattccgttaaatttcaataaactttattctttaattaataattaatgcagatatctaaacgatttatgatttgattgtttaccttttcattcttcacagtgatgcagatgtaaaagaaaattagtgagtggggagtagttgggagagatgtggtaagtatgattcagaaggcttttgatgatccaaatgtcattgctgaggttaatgaaactcttattactcttattcttaaagtggagcacgtggttaattagtctttgtaatgtctcctgtaaaataattacagattttggctcattgtttgaggccttttatggaaagatatatctgcccgtattactgcaacttcattcccaatagatagagtactgataatattgtgattgctcaagaaatttttcattctatgagaaagaagaagggagctaaggggtgaatagtcattaaaattgatttggagaaagtctatgaacgcttgaaatgggagtttgggaatgatactttgtatgacattggttgcccggccaagtttattgatattctttggaattgtatttgttcccccagtatgaaaatgttatggaatggagagctactccaggagtttgatcccatgctaggtattagataggatgctcctatttttccctatctttttgttttgtgtattcagaggcttttccaattattcaagttaaaccatgttattttttatatttaaatcatgtttttgtatatccaaaatcttactaaaagaatccaagtccagcttcactcaaacttatccaagctgcattttcccaagcttttcttttggtccatggcacacccttattttcggctattcagatttgggcttaaggattgtaattgattataactcttgggttgggtcgccttatcctttccttcctttttctctaggcctttgtggccccttgttttcttacgaccaaaactaaactacatcaacattaccattaaaattaatgataaatcacataatttattttaaaatttatgaaaaatctgatttataagaatgtatatatacctttttatctgagttgtagaaaaaattctacattatcagcgataggatagctagtgccagatatacaggaggaaatgcccctcaaaagaaatgaaataaggaagaataaactatttttcttgttctctagaattaattgcatttggtttctctacgcaaaaaaaaagtgataacatccgaacaatatgtcgccgctttggagaggatattctgggggcaaaaaaaacatactagtatcaacaagcgtagtggttaaaatgattcaaaccattaatcaagcatgtttgattaatcaattatgtcaaacacgcaaagtacgaatattagggggcaagtcaagtagaaaaccatcacaagcaaaacccactttaaccaaagagcatttcttttttatgatttaaccagagagtctatacatgtggagcacgactcaaacagagagacataaccacgtaattcttttttctattaatgttgaaaatcttcatcctcacataagaagtgcgatgcaatccgaatccttatccatatccatttctctcgaatctcttgctctcacttcgggctaattcattgagattcaatagtatataactatatattgatggtttgattttttttgggtacatattgatggtctgaatttgattatacattcagataaaaatcaaatttatgaactaaatatagttcaaatatcggcatttacccctttgatgtatcatcaattttgttagttagacaataagatgtttcaaaaattaggaaacaaaagctatttatttaatgctgtcaaaaaagaaaaagctatttatttaaaatttgaatgaacagcaaatgattaacgtgatgacaaaaattggtaaaacaaaatgacttttcaattactatatgttaacataattatttccaaagaaaaataattagaaaagcattgagctttttcttcaaataattaattgatgaaaaatattgcttttttttctaaacatggattctgcaattcgctaattataaaaccaaactcgaaaccccgaaaagaaacagaataaatagtgacagcattgtaacaaaggcaattgaatattaaatcaaacatgaatcccaagaaacaggtaattacaaatatgaacgctaacgaatgctaatttataaaaaagaaacaaacaaatccccagaacaattaacaagaaggaaatagaacaagaggatgctgtgaactagaacaatggcggcggtgcataaccgatgaaaggccttcctccgccgccgccgccgccgccgcaagaatcgcagaaactaacagtgtctttgatcttgtggaatccatgcttgaagactccgaacccgaataccaacccgatggcgatcaccaccagaaccagacacgtgcaaagcatgcaaactctccccccacaacacatctttccccagagatcgatgaaagggtatctcggatctgggaaattcgggtgctgattctgttcgggaggtggtgggaaaattgagaaagataatgcggaatttaaaagaaaagggaaatagaaagaagtgtaaaagtggtaaatagaaggaaggggaggcaacattggtgtctctttcaccaattcaagacgttttgatttgacgcttttgttcacttataaggaaagctatctaatccattaaaacaagattccctttaataaaataaaaggaacaaaagaaatttatctttttctcaactttttagatgccccatatcacataagtaaaaccgataattcattccatgtatttaaaattataagatagtaactagtgtaggaacatatttaaattttcaagacaatatacatatatttagaattaacttttgatattcagtttcaactgttatatggatgagggaattatttaacaagcataaaaaaccactaatttaagttaatttgaatagattcatctggagagtgaaaattatttaggcttctgtttgttttttttttttattattcgaattcaatatcttaaaaaatgttttgataactattttgtaatttatacaatgtttaaatatgtataagtgaggattattttatgaaatcatcaatatttcttcttttaaaaaataacattgttataataaataaataaaaacgaaaacgtgaacgttttgttgccaagtttcatgggaaacgtggaaggtgatgcgttaaaggagagtggtgaagtggttgagtccgttacaacaagaagctttgggaggctacaaatttggtgattggtccatacgctgaagttgaccgttgttaatactgaaagatactaaccacttacttaatctcccatatgctatactttaacgtctctttcttccatttccaatcatcaattccagtttttataatctagtattaacatcaacaaagtagtcacaaacgtattatttattacttccgtttttagttataagaatttttcaaaaatttatttatctattttataaaaaattattttctaaatgaattaattattttttcttttatatctttacttaattattctctctccaatcatttatgaaaaacaattagtatttttgctattaaatttgtttaatgcgagttttattaatttatttgaataaaatttcgtttattaagatttgtgtaatatttatttaataaaaagtgcattgaaaatttaacgcacctttcccaacaatcaacataactagtagtattaactaatggccgtggtttctttttcttgtctaattgcttttggacactaatgccagtagctgaaatattattatatgggcccataaaatatgggcttgctacgtaaaatgaaacaactgtagtcaaaacaggttaagcctactcttgacccaaaaacatgatccactgagttttccaacgccgaaataaaaaaattcaagcctgttaatattcaatattaacagtttaagctcttgtgattattagtgttgctctgtgtttttctctcgtttgaactttctcatagttatataaatattttgatcatggactattattctctctggattcctcttcctttgagccaaggaagggtgcttttacttctgcagcagtttgcttgtaatgttagcaatgatacatccataaaaatggttcatgcgacgaccaacctttgaccaagtatatcagatgctaacatggcagtaatactaataatacttctaaaaaaataaaaaataaataagaaggaaaaaagaaaaaacaattgcaagaaacagtaggacaaatcggttcccacataatgtgtatagaatagaatacttctaatgaactaataattattttcaattatttctccgtgtttttttaattactagaaatgtattatttaggctatttaaatcgctaataagtcatcttaatcacaaaattaatgaagttttgtgaaaatagttcaaaatcacaagcttcactaatctaaactaacaaggtaatatattatacgagtaaaatatattatcattcataaagtgatgatacattataatattagtatatacattacattgacaccatttttctttgtatctgttttttttataatttatatcatctaacatattcatatttatttttattcctaaatatatataatattgataaattcattcttaaaagataaaaattcaaattttagtccccaaaaatttatttgacacattcatatacgagattgtcaacgctttacatattcaagacgaaaatgaatatttatctaaaatataatttaatctcatattctctcctttttgtttaattattacaatcataccattacaataaatactttaataaaaaacatgttagaacaaatataataataaacataatattgattaataagtataatttatttattgttttgaaatttctaatattatagtaccttattcaaaatatgaggttcaaacaaaaatgtatagtcgttacattaatcctaaaaaaataaaactcaacttgattttgttactttataatattatcacaataaaaattttaaaacaacaaataaattataaaaagatgaaaattaaattatattttaaataaataattattttggtctatgaatatataaagcactccttaaatgtattacttaatctctttcattaataataaccaatcaaaaattacacttttttcgctttcaaatattaaaatttaaatttttattataataaaattgttaattctcatattgatgaatatgaaaatgactatttaaaaaaaaaaatcttagtttgtactttgacttcgtaatacattttgtggcaaaggtccaaaagtgtttatattttaattgtttttaagtcgacggaaagttttttggtggccgatagacgtatggttgtgaaattgcagcagaaatttctcccaaacgaaatggacaaaatgacctgggagcagcactacataaaaatgagacagaatttacagaatcgtttttttgttttcgtttctacattttaatttttttttccgtgtaaatttgttaatgtcagaaaatatattttctcgttttttttttttcttctacttggaagctatctaccagcattggtccgtttcccacttacgggtctgatagtagaatccggaagagccattcggagcagccaccacagacgacaacgagcgattaccatcaagcgccgccatcaacgacagatcatacagtgctctcgccgacggatccgacagcgtctcgtaagcgtcgtggatcttgatgaagtcccgttcgtccgattccgaccgacggagcgccgaatcagggtgatacaccttcgcaaggttccggtatgccgactttatctccaccgccgaagcgttctgcttgatccggagcacctcgtagaggtttgccgctcgccgggaatcgatcgccgtcgccgtgaatgcccgaattgagatccttaccggtggccggagagtcctgccggcaccggtgagaggcgtgagatttagggttcccgccattgagatattttctgaggtcttctgcggtgaggggtataatgggaaatgaaaatgttgcgtttgtggttgtggttggttgaatttagctttgttttgtgcagtgaaatgagagttgagagaggtttttatatggcggtcaaagatggagaatagcacaagattgagagaagggtatagtggtcatttaaatggcagcaggtattggtgttggtgcacaataacaacttcgtcttgggtttgcaaaaggttctagaagctgccccaccacgtcgtctttttttagtggagaaagttttagaataattgttttttcgcaacgtgttaaggaaaatgagatgcgtgtgggtacgacaaaaccagggaaaataaaataaagtgagtcgtggaggtgaaataaatataaaaaaggagatacaaaaattataattaatttttttaataattaattttttttttttatgaacgaagttgaagtttgattccgcgtgataggctgatagccactgaatctcaggagtcaatttatgttgaataatgatatttaaaattcgtgtttgaattcaagattgtgcaatatttttctttttctgtttaattggcaggtgctttgcgttcatatattgcacctgcaaattatatggcagtccttatgcctttttcatgctatcaccaagaatgtaccgataaaatataataaaaggcatagctaccaaggttttgagttatatagttgacaaatctttttgacttgcaaattttgttcgccattagcacctaaaattgcaattaatgtactcattatatagattgatccatctaatgtacaacagtgttaaacaatttaaatctttaatagcatattaaaagttgaacatttaagttgttgagcataaaggggaagaataacactaaactgatcttatattcataaagtagaaaaatgttaatgatattttgtgtaacattttcttctcaatattttctctgtgattaacattttttattaattattatcaattttggtggattcaacatttaagtaaagagaaataatcattaaataataaacaaatttcaccaaaattgataattttcaataaatttttgtcaattataaaaaaatgtaattgtcatttctctcacagaagatatgatgttatctttcagaatagtgatatataaggaaaagtttttggcatcgtaactaatacgagttgagaaaaaatcagcatgtttaagtactaaattaattttggcgccagctaaaaaagggaaaaggggatttaaattgataattcactagggatcaagatcactggcagttcaaatggaccaacggatacatgcagttttgaatctaacagtgaataatttttaacttattgtgatgcagttgaaaattcaactgcagaagttagaagagtgaggtagcccagcacagaaccgggacactttctcaattactgtgggcgtcgttgacatgattagtctggtaaatcacaatcaacgtgctcatataattcacttttttttttttttttttttgtgaatgtgctcatataattcactaatccagtagcttaacgctgataaaataaaaaataaaaaaacccagttgcttaacagagaagaaccgtgtactactcaccaaataggtacgtatacggtaactatttttgttagaaaaacaaaaaacaaaaaggtgaagggaagttatctttattctaatataaatttggtataagattataagtcattcacattcagtatccacgagtcaaatcttgattcattttggttttgaaattaaattaaattccacaagttgcattgccagcgacgaaatcacatatatcagaagcattaatctagcataataatcatgcacaaaaaagtcaatgtgggtgtacggattcctatttgagagattaattttgaagtatcacccaattgaggcatgtggcagctctatctctatttgacaactatttttctcctaactcttgtctcgcgttgtccatgcaacatttcaaattattgtgacaccctcgtcctttactccaacactcatcagatgatacccttgaatagatagcctttgtcctaaaatgtcagcaaatactataagattatattaatttcatctaactgattaattgtctctaactaataagctagtatgcacagatgcgagaacctgttagatgcatgggttgctttgttttttctttttggtacacctttgctcttatttgcatattctgttgtaaggtggtgttcttaacttgactgggcactacttgtgttaaagtaagtgttattataaatgtgcggtctttttaaatcatataaatgttcaggctttgggttatataatcacaaaatttaaatatttgaattggtcagtcattgagtggcacattgtaaaattacagtttcaacaccaaaaagtaataagtttttttaaaaaaatatgtaaaattacaataataataatatggtttaaatactttttaaatttttgtaattaaacattttttgttctactaacttgataaaaatggttttagtcattttaaattatgtttgttttttgtcatttaggtgatttaaataatatttttcattatttaaagcattatttaaattgttttaaggacgaaacataaaaaaaatatgaaattaaaataaattacaaagacaaaaaaataaaaatgctaaattataaggcgatctatcatgggatttttttttcctaaaatcaataaaaattcaataatttgtacaaatattttaaaaataacattgcaggttagacaagaatataatcaatttatattatttatatagtttattgtatacaatatttattaatttttataaatgggttacaatgtaaaaataattaattatttttacaaaatagacatctcatacatcttaaggtctcgccaactagtagatgtacattttacgccccataataaaaattaaagataaaaatctacatcaaaatgaaatatattataatcttaattatttagacacttccaaacttttatctcaagcaccgccattgttgaaatgtctaacaatcaagacttgaacccaatcctgaattcatgtgaacaacaaattcattagatttaacacactttttttttttaattttcatttaaccataataatgttttttatgtccttgcctattctttttagttttcagggatgtttcttgagccttttattttttctgtgaaaaatgatcatttaatcctttctcacttttcacagtaatttgacatagcgtgcaaccccactcttgctagaatttcttctgtaaactaattgaacaaatgctcatagttatcaacgacacgaagtgtcactattttgcgctttgcatcaacattcacagcgataaagttgtgtttttgtgacttgttgatcatgagttcaaatctgaaaataactttttttgcatatgcaaagataagactgtatacaatatctttctcccttacctatgcatagtgtgaagcctccggacattgggatacgtaattatacactaactagtgtgatcatttgatccctttaagtctgtgcattatattgttgaccacttatatattggaacaccaaatgtgttagagttcttaccccaacaatcttgattcaaagacatcaaaattcattttggggccaagattgcctcttgtctttgcattgagatgcctaacgccttcttcgacctcgttttcctcataattttctcttataactctttttgtcagactaatgtcatctcgtcaacgaatatcattctccagctatcatcatatttgttcattcttcaactctcgttgaaatgcttcatcgacattaatcaacattgacattggaaaaacactaggtgttgaaacattgacaggaaaatcacttggtgcgaacgcacaacctataaataaactagtgttaccaaactttttttttttaaataacaacacatgaacacaaatgggtcacttgagaggaacgtgaagaaaaacaagtgttaccttataataagcatctagaaatgtaggcaattgtggaaaaagggtgtgatattggagatggagttctttggttttggaaatcatgatatatgaactccatgacaaaaagttggaacatgaaaaaaaataaaaggagaaaagggaaaaaaattgtatcaaggaaattagagacaatgtatatgtgagcgtgtgctgtgtagagtttggaagtatgattaaataagtgcaagaggtgagtatttgtaatgcgattaattctactttttttgctcatgtgagcgatgatcaaatattgagaatttatcaaatttgtcgttcaacgcttgaaaaggaaaggaaagggaaaatgaaatttgactcagaattctctcatttttttaacaaagattaattatttgacttagaaaacttaaaaagtagtttaacttagaaaagaagcattaagtacaaataaatatttgataagttaaggttaaattgttatttttgttttctataatttgcattcgtgaattaagtctctaaatacatttaattatcttatttagaccgttaactcaacgcttatgtgacaaaggattaaataaagtaaaaaataaaagtagaaattgaacacataatcttttatataaaaaccaaaaaaataaattattaagacacttactttgtttagtcagttatataaatattcttttacatatataattagtcaagaactattaattttttaaaatcataaaaattgtatattaaaataaagtatttaacatttaattttatgtatttatttttctcacaagattttattttaatataaattaataaattattatatataaaaaattattcttgtttaattataatattttttaaaattacataattaatatatatatcattttaaaaattattttatataatttatacaaattacataaatttaaaataatattcaaataatctaaaaaaattaaaaatttattaatttttataattaagatatttgtattaattatatataaaaataaatttgcataatttaaataaaagatttacatattaaaataaatttagttaacttatataatttaaatattaactgatgcaattatattgatttatataactatattaaaaataatttttacataaaaatatatttacaaaatattttttgaaaataacatatatattaatttgtgaaattgataaaataaaaataaaattgtattaaataaacttaaaaatatttatatattaatttttcttaatttataaatttttatagttctaaaaaataataattttttaattactatgatatttgtgtgaagtatctactaattttattaatggcaaatctcgattgagaaacctaactgatcacctttattgaagtctcctttctcaactatatttttttcatccacaaaacttaaactcgagaagttgtctaaaagaaatgagccaatgacttgttggaaaaaaaaaataactctttagtagtaactcatataaaatatttataaaattaactaaataaaatatttatctcagtaatttattatcttttatgaaaacacataaaattaagttactttgatttataaataaagaaatcaaaatcataaaattaaaattataaaaaactaaacttataatttcatagccgaatattttccatttaagtttttactttttactcaatcaacttttgttcagtggttgattaactcatgttataaatgaatggctgaaatgaaataattttagttcaggtgaacaatattacggctaataatgtgaaagcgtcgcaatgttcgggtttaatggagtaagcttcaaaataactaaatttactattacaattacaatttttacaatattgtatccttttatatatttttaatttcaatattataaaaaaatattaaaaaatgtttaatatttttatttaataaagaatactaagagataatttaaaaaatttaattgttcaagtcctttgtatttgaagttttttattggggtgatcgctcattatttgaatgtttagataataaatccaactaatttggtatttggtgataacttcttaatgtttattatttatctatattctgttagtttaagagagagaaaaaagtaaagggaagatatgaaatttcattaaaaaatataatgggaaaaatatctaattctttatttttttaaaataaaaaataaagtttaatgattaactatagataatataaaataattttgtattattttaataataaatttataaaatcattattaatataatttgtaaaacaattattataaaaattaagaaatttatcccacgttataattttttattagatgatagtctttttttctaatttttttacacttgttagtgcctagtcttttaatctatgcaattaaattttaggaaacaaatgccaagtcagatctgagctgtgaacgagttgtaatcttatcatccacgtcactggcatgcatattgttctgagtgatgtcatactactcgtttttgtaaacatgaaccattcctgtattttcattgctcaattattttagaatttagtcatgtattcacaatataaaatataaaatagtttttatattattaattagaaattattattcatgacttttaaaaataatattataaaattagtaaatttattatatataatttgtgattaaataatataaactaaaatctactactttacaatgtaaattcataatccatttattcttatttttatttgtttaatgaatctaacatgttgcataaaaaaaatcaatgtaggatgcaaagacattgaatgaattgaagtgaaatgcatgcacagcagagcctcaagtcaaattgcactataaaatatcagagaaactgacgccactccatagggttcacgtgtgccttcgttgtagatcattcatcgcctttcacccgattaccggatttttttgtctgatcaaaaacgatttttcttgaaataggcgtcacgtggaccccatcttctatatgccacgtaggtcatttcaccactcacgacgcatagatttttcttccactgattgtgatatgctgcttcgcccttgcgtcactccacctacacctcaatggccttatcatatccactctgcgaatcaacgactctcaaatctcaagtatcattattgtggcccccccacacaatttcctgtgctttcacgtgtgctgataaagtttattttcttttccttttcggagaataattaccgtaagtttatttattgtttatgtttacttatttattttagtttattcattaaaaaaagatagcactgtattatttatacataaagaagtacgattttaaaaacaaaatatctatgcctcttaatcaataattggagagataatttatgtcaattactatattttacgaattgtataatagtgcaatttgcaatacgaatctataataaataagagacgagtaatgtaataacaaaagattaatcggtgcactatttaaataatgaaaaaagattgtcattgaaacttgaaagatgtgttattgcaatgtccttaagtttttgaatgtctcgagtgatcgcttacctttctgattagccgatcttttaagttttaaccacaaaagacaaaaataaataaatacaaagtatgttgtaaataaatgataaatataagatatgtccacatgaatatttgtagcagcaaattttcttaaaagagagagaatttagtctgggagtggctagattgattgcatggtgttgataattcataaattatggatcaataatggcaatagttcctaacaaattgggcaccctgctgacacagctttacgtgatattatcattatcctgttgctataaatacccttccctctccttcccatgctgcattgactcatttggatttgatttggaacaaacaacagtagagcggttgcagtgctctgtgtgctgcaatttccttttgagcttgtgtttgattcatcaaatcatcaaagatgactgtaggggcaggaatatctgttgcagatgggaacttgatggtgttggggaacaaagtgctgagccatgtccatgacaaggttcttgtttcccctgcatgtggtggtgctttgctcaatggggcattcatcggggttcaatcccatcacaagggtagccgcacagtcttcccaattggcaagcttcagtatgtactcttcacttttctcttttcaattcttttcttcttcttcttgttggtgaaaaataaaatctttgtaattttgggtgaatgctgtattttttgttgttgcttgtcacaatcaggaagtgcatgtgcatgtactggattgcttttgatgtttcttatagtgtgtgttggtgcatagttaataatatttattttaggatactgcaattctgatcctaggatgatgttttttttttttttttcagggggttgcgatttatgtgtgttttccggttcaagatgtggtggatgacgcagagaatgggcacttgcggacaagaaatccccattgagacgcagttcttgcttgttgaagcacacagtggctctgatattgaaggaggaggagaccaaggtgctgctacctatgcagttttcttaccccttctggaaggagatttcagagcagttcttcaggggaatgatcaagacgagattgaaatctgtgtggaaagtggtatgtgatcttcagaagaagaaaaaattcattagtttattcgcatatttgtggggatttttttgctgttgtgcaaagtgatgaaatttgtatctgatttcaggttgtcctgctgtggaggaatttgatgggactcatttggtttatattggggttggatccgacccttttgaagtcataacaaattctgtcaagtgagttaccacctttcaataaatttcatctatgtttttccctaatttttagtttataccagtcatcgaaatctataagtaaggctttcgggttgggatcattgacttttagttattacaaaaattgagtttaatcttctgaagtaatatttttgttttaacataactgcacgtttggatgtgcagtgttttatatgtctaaacaagtcaagttattgattttattttaattttttgcaattttttttaggaatgttgagaaacacttacagacctttgcacatcgcgagcgaaagaaggtacatagcttctccctccctaaaatggaaattccatagacagtcttatttctgagcactgcatcttaaagttcactacctctaattttactttcccccccacttatattcagatgccagatatgttgaactggtttggatggtgtacatgggatgctttctacactaatgtcacttcagagaatgtgaagcaaggattgcagaggtggtacttccttccatggacaatggacatagttatgagatataccgcatcacataaatttgtgactgttacatttttatttttatttttgcagctttgagaaaggtggaattcctgctaagtttgttataattgatgatggatggcaatctgttgggatggaccccaatggtgttgaatggaaatctgatagttcagccaagtgggtacttcctttctaagtttcattatcaaattgtaattccatccattttacattgttgaatcagttcatttttgtgctttcttgtccaatagctttgcaaatcgcttaacaaacatcaaagagaatcacaaattccagaaagatggcaaggaaggtcagcgagtagaggacccggctttgggacttcgtcatatgaccaatgaaatcaaactagagcataatataaagtattgccattttcattttattgtttctatttctccataagatattcagttcacacatagtactcatgatcatctttggaaaatctttcccaggcatgtatatgtgtggcatgcaataacaggatattggggaggtgttaaacccggggttccgggcatggagcactacgaatcaaagatggccttccctatctcatctcctggagttgagtcaaatcaaccagatgaagctttgacaacaattgccatcaatgggctcggccttgtgaatcctgagaaagtttttcatttttacgatgaactccactcatatttggcatctgctggtattgatggtgtcaaagttgatgttcagaatatccttgaaactcttggagcaggacatggtgggagggtgaaacttgcaaggaaataccaccaggcattggaggcatcaatcgctaggaacttccctgacaatggaatcatttgttgcatgagtcacaacacagatggattatacaggtatggattgcttataaaacttcagtgaatgcttttattaacacaataacaatagattttttttattcatgatgatgattttctttataaatttacttgtgtagcgcaaagcgttcagctgttattagggcatcagatgatttctggccaagagaccctgcatcccacacgattcacattgcatcagtggcttacaatactattttccttggtgaatttatgcagccagactgggatatgtttcaggtaagttaccaaatacaggatccttccttcttttttcatgaaaaaaaatatgaacttgcttctgcaggagctaattaacttcttgtgcaatatgcagagcctacatccaatggctgaatatcatggtgcagcacgagctgtagggggatgtccaatttatgtcaggtgagtagagcttgtagtaattttttttttcagtactttttttatttgataaatgatgtcttacctttggatgttgttctattgtgcagtgacaagcccggacaccatgactttggtcttttgaagaagcttgcactacctgatggttctatattaagggctaaacttccaggacgaccaacaaaggattgcttatttactgatcctgccagagatggaaagaggtaaagaatccaaaatgatttggctacctatatagttatatacttgaccaattgatgtagtatcttactctttacactctactacaaaataaagtatgcatgcttctttatatttgtattttacttaactccttgtatgctgcttttgcagtcttctgaagatttggaacatgaatgatttttctggagttgttgcggtattcaattgccaaggagctgggtggtgcaaagttggcaagaagaaccttatccacgatgagaatccaggcattgtcacaggtgtcattagggctaaagatgttgactatttatccagggtagcagatgataaatggacaggagatgccattatttattcccatcttggtggtatgtttttcggcttcacaatgacacttgtaaagattacaaaatttaacccaaattttcttttgtgtaatggtctttttatgatgtcaatttgcaggagaagtggtttaccttccaaaggatgcatccatcccagttaccttgaaaaccagagaatatgaagttttcacaatagttcccgtgaaggaattgagcaatggtgtcaaatttgctcctattggtttaataaatatgttcaattcaggaggggctgtccaagagtttagttggggatctaatgaaagtacaaatatagccatgaaagtccgtggttgtggccaatttggtgcttattcatcagctcagcctaagttgataatagttgattcagaagaagtagaattcaagtatgaggaagaatctggattggtgactattgatttgagagtacctgagaaagagttataccaatggagcatttctattgatttttgaatcagagactttgtctctagatgaaggggtttagagttatagacttgatagtgtatccatagttcgcaacaatatgatgagtgtatgtagaccaatagcaggaaatgttaggttccctgtaaggaataaccagaagcaatgaatgaatatcacgaagttctctacctattttttgtgatatacttgagcagaatgtaaatgcagcctttgcatcgtttgccatacagtatgaattggcccatacagtatgaattggttgctctttagtttcattttgcctcatttctaagaagttcattgtagtttcgttaagctagaaaagaaatatacggatagaaatgcattatgattagcccgcgtatcctttaaatggagaattaattgatttgataaattcaaagattacatgtcttcaatttttttatgctccactgcaaatattactcaaggcgtttctgcaagtatggaactcctatgctgatatgctctcattgaaagcagttactgagaaatctacattgacagcaggtccttgttgggttggtctagaactctgaatgaatcctctcaatttaacaagtacttctgaacaaacctaaggactctgcagcaggagacaaatgttaaacaaagcaccaaatatttcctctatgtaagcctgatttatatgcaagcaagtattgatactaaagattcaatgatagcacacccttggaattccagcttcacataatggtggcatgagtctagggtaaaagtatataaattaaagaatcaaaattactaataaaataggccttaactatgcttagcaaaccagtttatctccaaactaaattcattataagtagaacaatccttgcacctttttttttttttttttttttccttctgatatagcttgatagactgcagaaaaagatgaaagagctttttgtctccattcttgcacctgtgaaagaaaacagaagtccagtaccaagattaagagagcaaatgcaaggcaaaggcatgtttttggccttttgagcaccaccaaatagaccaccaaatgagttcatttttttcttttgtgatatgagatccctactacacaatgccaaagtgattcactagaattatgctaattacaccattaaaaatgtaactcgcagtccaaaattcaagtgcagagcttctgactttcaagcctaaaatgaccctcaaaatgacagaattgaccttagcttatctctgacaaaattgtagatctttttcttatctttacagggacaactcatatgtgtcatttgaagttctatagagctctctaggtcctgcacaaaaaagatagattaagtgagcataaaatccgaaaataaacaataattagcaattaaatcctcttgtttgtctaagacaaaaactgaattagaatgagaaaataaaaatctaagagaagtcaaataaactaagaagaatagaaaaatattaaattaaaaatgctcaatcaatccctactacacaatgccaaagtgattcactagaaatgtcatcaatcacattttaaacattttgaagtgcactaatgccgagcttactagcaatagcctaggcgtttccttgttgttgggctttttgctaatcctttacaccaaaaaaaattgatgcaaattctccaaaatctaatccaaaaaattcattaataagctccttcagaatataaattggataattttttaagaagtctgcgataaactcagataaatttatggtactaaattgaaatcggtgctgctattatgatatcaagtgctgaaaatcaaataccaatcaagcgcttcctgaccaaagttctaaaaccaagaacactgtaatattttttaagaaaaaagtaaaaagaaggcaacagcccagcccacaggccacagccaggttgtgttttatttatataattatgggtaaatagttaaattggttttgaacaaattagttcttcaaaaataaaaaatataaatttagtctttgaatatgtaaaaagtgtgacaaactaatctcgtatttaattacttaaatttataagatcattttatcgttaagttctaatgtttaagaatttgacaatattatatttgtcgatgatcaatttgacaatattatattttttgacaaccaatttaagttgtaaagtttaaagatcaatttgtcaatctgcataataaatttatctttcaaatattaatttctgagcatcttaccaagttgtgtcttcaaggatgaatttgccgattaatttttaattattgtttgagaaattatatttaaataaatttgtacaacaatgaaagaaaaaggtgtaaaaattatatgaataatatttgaggatagaaggctataacattggagtttcaatacaatggttaggcctacaaaacgccacgtcggtggtgggaataagcgtttaagtagtttgagtttgggtttggcaaaacaaaaccttggttaaaccctgaactgaaagttgcattgcaatttgcaggagagaaacagagatgtttggtaggggaacggtgtggtcagtgttgaagcgcggcaaagaagcatgcggaattcacaagctaagccttagaggaacgcctttctcttcttcttcaacccaaccaccacctttcaagttcttaacccctcccgtcgccacccattacattcatgctttccgatcccaactaatccccaaggttacctcactttctcatctgggtactcttcaattttcaatttttatcccttttaaacttgtatgatcttatgggtcatcatctgttcctttactttttatattcacaatcactcctaattctttaatctctatctcattctcagaaatacccactattcttcctttttaattcctccatgatgatgctattatgtgtgaatgattagttactagttactactacatctagttagttctgaggaaattgtgttgggatgatgctttttatttagggtcatcatgttcatgtgccacaaatgaggaacttttctaagatggtgtctgctgaacaaaaagaaggattgaagctgctagtgagtgggggttcgcgtgctcagaaattggttggagtatggctctttgggtcagcggcatgggtgttcagcatggtggtgcttgggggtttaaccagactcactcgatctggtctttcaatgaccgattggaaattcaccggcactctccctcctttctcagatgacgaatggttgcaagagtttgataaatataagcagtcacctgagtacaagcggtaaactgaaaacacttgctacacctttttaatttcccattaacttaggaaatgcaccaagggactttttatttttatttttctgcgagaaaagatactcattccttaacatatgtaaataagtcttcttgaagttggctgactaattgttaatgattgaaatcaaatcataataagcagatgattaaaaatttaggaataatgttttaaataactgttctcaaactttgtcataaaattaacacggttaaataatagtttaaacttttttgctgcaagaaaaattgacatgattgtgtgtttcagagtatggggatgataattaatatgacagtgatggagaataattgaatgaataggtcaatttttagtgctgattgtgtatttattgcaagaaaaacaagggaagggattagttaagtggaagtgagttgacacttggtctcaaagagcttagtagttcttatgaatgtcatgatgataattagttttgcgcttgtggcagtgttaacagaggcatgaagattgaagaattcaaattcatctattggatggaatatgcacatcgtatgtggggaagggcactaggagttatgtttgctttgccatattcatattttcttcataagcggtatattacgttgagattaggactgagactctctgttctgtttgccctgggtgctggacagggtctcattggttggtggatggtcaaaagtggtttagaggttggaacataaataatataaattcctctctttatttgaagttaaattgaccggccctgtcagattctaataacattttatttctttaggagccaccatctgaatattctcagccaagggtaagcccttatcgtcttgcagctcatcttacatcagcatttgctatttactgtggcctcttctggactgcactttctgttgttatgcctgaaccaccagctgaatcgctaacatgggttcgtggggcagctaaagtgaggagacttgcattgcctatcagcgtacttgttggtcttactgctgtctcaggtgcatttgttgctggaaatgatgctgtatgttctcttattcaatagtttcttgcctttcacatttatacttgaaatgataattgagcctttggtgaggataaagataatcattctgctcacatgttaattcccaggggcatgcttttaatactttcccaaagatgggtgatacatggataccggaagacatttttgaaatgaagcctctgattcgaaatttctttgagaatacatcaactgtacaggtaatccatgctgatatctctgaaaagcttaaatagtaataatatctttgttttcttgattttttttttggatggatttttattatcttttcaagaattgagaaatttgaactgaatgaaatgttttgaaacactttgtgagccattattgttggattggttagtagtaaatttatcctcaaaagtgtggtttggcggccaaagttttaacaacatgaagttctaattggtgtttcgcattgctcttaacagcttgatcaccgtatacttgcaactgcaactctgatttctgtggccattttatggtggtcaacaagaaagctggagatacatcctgcagtacgatctgtgattggaggtgctgttggcatggcagctcttcaggtcttaatttcaatttccagttttatatactttataataattatcattttgtattgttgtttctagctagctctctgcctgtcgatatattgccttctttgtcgaactgaatactcagacctgttattccacgtgtttttgtctgattctttaactaaatgaagatgatgatgataaatagataaaatagaaataggaagaaagactttatggtgtttgtttttgttagtagtctagtatatgatttcccagaggctgttgtcatccagtatataatgtaattaattttgcatggtttcaggtcaccttaggaatttcaacgcttctttcatatgtacctgtttcactgggcactgcacatcaggctggagccttgacacttctgacatttatgttacttcttaatcacacagttcgaagaccctctttgccccttctcaaatctctgcctcaagttgtcaaagcacactaatggtttcccggtattatattgcatcaaggattaggctttttaagttgataaaatctgtgactactattttttccatgctaaattgtgttgagctccttgtccaattttccactgttggaatcttctgtatttgttttgtacatttgaagcatgaaaattcatgatgatgcaaccgatctgttgattatgtaattaacagatacataatattaaaaagtataacctgtgattggaggaagagaataaaatttttgtaatttaactgatccgttaaattattgtctgtctagaaaccttaaaccaaagaataatatgatatccaaggtttttccagggtggaggctacctcaaatgaatattttgaaaatgaagcgctaaacacttgagttggtttattcagaattataactaaccaaattcaagctcgcaacatagttcaataccacaatatctttacaccattatcactatatagaaatcttaaaaaagcattggaagcaattttttttttttttttatcacaaatccaacatcttattcagcacaactttatgctactgggagtctaaattggccttaaaataccataccataaagcaacattaaaatcacaaagaacatttaagtactttcgtctaagcctttaacagttttactattatatattattatatagcataatatacatacatttttctttcaatgttgtttttaatgaaattgtgttatcaattaataaaattactagcatagttgagtttaggaaaagagactatctctactgctcatatattcagtatttgagagtatctcaaacaagattaatgtgaagaaggatacatgtggcgaacaaaaaagagttaataaaatttatttacatatattgcttttaaatcttaatttaaattttaatcacagataaattgatttcatgtaatttatatacttttaaagaaaaataagttggttatacttttatatttatagttaagtcaatcatctattacatgtaaataaggacacagttatttaatttttaaaatataaatagtttttttaatacatcagtaataatctagaactaaatttaatattttattttattttgcgagtattagtgagttatatcgtggaataaaagggcactacgacgtaggtggtttatgatttttcgcgtaaaaaggctgtttccactttctataacagatcaacgctaaattcatattatcttattacgtggttgtatgaaaaaaggttcaagctatcgaaagaaaaaaaatgaaaaaagattcatgaatactagaaaggtcagaaacatgggttaggtgtctcgtggatcttcgaatgaagtttatttgagaggcttgcttgcgtctatatataaatatgttatgccttcgaaaaatgcttactcatacacccttttaattattttcattataattcttgggccctgagtgtgtgatttttgagaagcaaatcgatcaagcttgaagggatacaaaaatgagtgaggaagaaacagatgattctccattgattcaagcttttccttcccttgacgtgccatttaggagaacgtactggtaagtggttattacatctgtttttaatcatttataatatgaaagctttatttatttctcccatcagaatgcttttgtatatgtaaaaggaattacttttcttcttcctccttggaatttctgccattaattttctctgcagccagatggtattgaatttgaatagcagtagtgagatatttgttggactgactggtgtgtgaatggcagttggtagcacctttgtcttttctaatgagtgtggtgtttgttgagaaatttaagtaacaagtattatttaaaaaatgtataactaattaaaaatatttaataaaactgataaaaaaaaacttctcaaacttttaatgaaggagtttatatcaatattcttaattaccatgttacatttttttaatcataaattttatgtccaagtgatgaaagttaaagatgaatatagtaattgacattaattttatatatatatatatatatatatatatatatatcatgcttaccattcaaatattcaaaagaaagaaaggtaattaaaattctaactatatattattctttatacatgtgacatgaattaggtaatgtagagagggcagtggtacatataataagtggtgtgataggggcaggggtgctgtctctagcatggtctgtggcacagttagggttctttgcaggaacaacctttctttcagcaaaccttctttctgactgctacagattccctcatcctcaatatggcaacattaggtgcccctcctacatcgatgctgttaaggtctacctaggttagtgatcaaacactattatatatgccatgcttatttccacttttatgattaataggaaatattatgatatgataaattaggagacacgaggcaaaaggtgtgtggagtgctggtgcatgcgggcttatatggtgcatcactgcatcaggtaaccccatgcatgtgtttttaatttggcatagctttattttctgttctacttatatctaatggtgagttaggatgagtgtaatatacatatttgggtttggatacctttgatttctcttgaattaccataaaacaccagagtttatcaacttcatatagctaaaataatgtcaaagtttgacaaaatgcctgcaacattaaaaaataaaatttattatgtgatataaactttagagtttagatgcatatagtagacatttatttagtcattttttatttgtatttatttatttataaatgaagattaatatagataaggaaattatgggggaaatataacctggtgcattaatttggtagagtttctttttcaaatagaaaagttgagaaataatagaaaaaatgtatctgttaatcaaatcaacgttgaaacgtgaaaataagaaatggtaagcatttataaaattgatttaatttgaataaaaatgattttaaaattggttttgattgtaattgattgtgaagtaaagttatttctttatgtttaaaaatctttactctaaaagcaaattagtactaaaattcagtatttttctttatctaacgcaaaactatctaaattgttttaactcagtaaattataaacttataatcaattcttcaacaccggactgaacattagaaaatttgcctataatcacgttaactaatatttaaagtgattttacattactcaacattaaacagagcacacacttggtaaatcctcttgtgcttgttttcctttttcttttattttttcagtcaaaatattttttgggtgaattcttatatttgtttttcgaaaatcttcggacatggctctaactgtacgtttgcttttgctaagttaccgttaacgggctgggctagccataatacttgctcggcctagcccaatttgcaagtttacatgcagactgttgttcggaatttgaatcatgcacttccattagtgtatcttacatcctcctatttttgtttgaaaatatcaaattacccttctccaaccctaacacttccctctttgtgtgaattactcccgtgatgacaacttcttctcccacaatttcaccttcttcacggcagctttgtgatctcctcctcacaagtcacaatgtcgcacaacgtccttcccctccctccttccaatgcacatcatcattaaaggtaagaatgtaatccgaaacatggtgttttgtcttctggaacgaccattttaaaatattttttattttcaactattattccaaagacacaatttcgaaagttatataatagtcggaatgataattctgaaacacagattgagttctagaatagggttttcaaaatacataaaatattttttattttcaaccattatttttgactattatgtaacattattttttattgttatgaaacatctattttaaaaattattttttacgattatgaaatacctattctagaagccataactattttttattgttataaaatacctattctaaaaaggtttaatatgaaaagggtagtttgtgatttttaaaaatttgggagatacatgattcaagatgggaggtagaaaattcaaatctcttgttattctcttataactaaactgggccttattgtagtaagtaataaccactgacaacaccagaaccaaaagattaaaaaaaaaaaaaaacttaattcattctataatctttttttgtacaattgaacgcaacacgcatactaggggttgaatttggggagtgtttgatttctaatttctaaaatatatttttggttttcaaaaaataatttaaaaaaagttggtagagtagaggatagtggaagtctggaagacacaatgagtaaatgaggaaaaattaaacaagataaaaatcgaagattagaattaattatatttttgatcaatcaaatttcaattatgcaaattgaatcttacgaagtaccgtatttattttttatccacaaggtccgcatcccaaattttacttaaagaaaccgagtctaaaattacttggaccaataacttttggtaactaaaagttttattaagtattttaaaacatttttaaaatgtaatagattttaaatgaaaatttaatatatgaataatgtgaaattgttttgaaaaaaactttttaactgtgaacttgttttgcaaaacatttttaaaatcaaaaagtgaaaacatacatgcccttaatatgacatccttgcattttcccaccagatggcacttctactactaaatcaacagagtatcagaaccaaattgcaacttttgaaactaggggcttcaacagacgttatttttttgaaggagagtatatatgttattttgaacagacgttattcctattgagttaaaagacacaggtccaacctgctacataggctacagtttatgagaaattctggttcagcgaggtagacattttggcataaaatacgtatatactttcctttatttgatgattaataggtggtccatctgagtctgagaggcaaccgcaaaatatatttacctagagatttccaagcatttaacctaaccagttattttaacaggaattcatatctactttcctttagcacattgctaatccagtggtggggtgcaataagtgctggtggaagtgcagcatttattggcaattggtgaagggcataatttattagctgggtaaaaatgtatgacattggttttttgctgtggcaattttggctggacttcatttatgttctgtgtgcgggcgtcaataaggtgtaacctttgtgggtgctgcacaaaaaagactatatactttatctttgcatatgggaagttcacaaagtcccataaaattagcacaatccttgcttacgataaggatgagccaaatgatattccaatcaattaaagtagcaaaagacattactcaactgaataaagatggtgcttttacgcaaaatgattctacatatttttcaatggaatcacaaatttgctcttcgttccttgagcttgaagtgaaagaagctaaacggtagtgggccttagcccttaggtgtgataaggaagggttgaaccatgttgccagtatacattcattttacgcaacctattctagtcctacatattcttcatgaaatccaatattttccatacgctccttggatagaaagaagctacacgtaatgggctataggtatgataagcaagtgttgaaaataggagcataaaacactctggtcttccacgtttggcgtgctttcaacttcaaggacaaaaccaatataatttcaaatattcattcacttagtttgttgaagactgtcaaataatagagtccttctcgtacgggaggcatagtgaaaaaagcgaaaattgacaaactcttatctctctctttttgaggggggtgggtgtgagaaattattaggtggataaaaactattatcatttcattaattaatctccacgtgacatgtatgtaaaaaaatattattaattatttttcataaattgaaaattttgaatacgtgacgcttaaaaattagaggagactatgaatatgtggtggtcttaaataatctaataatatgtagtagggtggggtatgaagtattgtgatgtatataaagtttgtacacaaactaccagaaagagatgatgttggagtatttggtgtgttgactaaggtgagcaatacccaacatgatgttaaacataatatgtaagttttctaaattatctattttgtacattttcaaatattctgaatcttcctacattaaccccactatttcactcacgtacctctggtcatctgatagatactgattactgaatcattttcacaatgttgagcattgagagaatatattccacaagaacacgacagctccattattagaaagttatgatgacgagtacatatctttattaaaaggttaccacagtcatacaccatacagcttcaaacttcaaagaatctctttcctcttcacatcatgttctggcctgtattttttataatgaaatctagtacaataaagttttcctgattttatgctgtgtcctgtcgctagtaatgtctgttttagtacataccttagttatcaagaacatggcttccaaaagttttaagatactagctattttaattttggtttggcacagacacacatgtttatcagcatagtttagatttatttacactatttcctgcaacttcttctatgctgctcgtcaattacttaattttaggagagttgtcctagacatcaaagaagagtcctttatcaattttgaaaattcatataaaatgtcatctccttttttaatttcataagcatgtgacatgcagaccaaaattatgtagttaccaaacaaacataattttgaattcaagtagctgccatatagttcctttgattgtagttggctgtagactgtatacggaattcaattacactgaactccatgaataccaattgagttggatgcttggataaaaatggctgttcaaaaatctctccaaataactagaagtggtagtggtggttatgacgatgatggacgtgctaaaaggaccggtaaaaatctctaggaccattccatattcatatatatgaatttgactcctgaattttagtccttccatcaattttaccaggaactttatggagtgctgtggctcatatcatcacagccattattggtgctggtgttctgtctttagcttggagtacttcccaattgggatggattgcaggaccagtttgcttgcttttttgtgcaattgtcacctatgtttcttcattcctcctttccgattgttacagaactctggatcctgtaactgggaaaagaaactactcttacatggatgctgttagagtctatcttggtagttccttgttcttgtacaagcactctagtctcaaattcaggatatggttccagtgaaatgctaccatattttatgccaactaattatgttttctgttagtttaggcaataaaaggacatggttggctggttcccttcaatatttgagcttgtatggggttagtactgcttatgtaattaccacagcaacctgtttgaggtacaattcccgttaaatcccatgtaaaattaaaagatcattgtatatatgcaattttgaatttgtgtagtagtttgttacttgtatcatctgttgcttttttttttatctcatgtaatattagaggtactagtctaccttaatgatatttgtgttcatgttctaacgatgcttggtctttctacaaaatgcagagcgatattgaaatcaaattgttatcacaaggaagggcatcaggctccttgcaaatatggggatgcagtatatatgatgctgtttggactagttcaggtcataatgtcattcataccagatctccacaacatggcatgggtttcaattgttgcggctataatgtcctttacatactcatctattgggcttggacttggaatcacaacagtcataggtaaggttcattttcacaattagaatttaatgttttgtttacttgtccgttcaagccttctgatcattgaagaaacaagatgaaggaaaaaaaaacaagtactattattctaaaacacaaatgtagctgctaaaaacatattaaatgccaaaatatatggaatgtggaatttatgtatgaagaaaaaaactatattatgatattttcttagaatcaaggagtggaaagagaacaatggatcatgagacttttggttgcttttgcagaaaatggaagaattatgggtagtttaacaggagtaccggcttcaaatattgctgacaagttatggttagtcttccaagcaattggtgatattgcctttgcctatccatacacagtcatcctccttgagatacaggtacccttcatattccaattgggtgggagaggaacgtgtaaaggagaatttaatttaaatgcactcacaagtaaactgtaaagatattttatattgtgattcaataacaaattgttatttatagtaagtttgtttacgttataatagctattttaaaaattgtatttaacatgattttttatcagttgacggtgcatttttttttttcattatcagtttatagaaattaaactctaaaagaagacacaatttacagctgaagctaagtattgatttttttttttttttttttttttaactgaaggacactctagagtctcctccaccagaaaacaagaccatgaaaaaggcctccatgattgctatcctcattacaacattcttctacctctgttgcggatgctttggatatgcagcttttggaaatcaaacaccagggaacctcttgacagggtttggattttacgagccttactggctcattgactttgcgaatgcttgcattgttcttcacttggttggaggatatcaggtactagtgctactgatcaaagttcacattttatacttaagactgtaacttcttattaatcaattgaactactacattctttcttaatgtaaaattaatagaaatgatggtattcataccgaaagcacaattgtaacaggtaaagttaccataaggaagaaattaaaacaactaatacaagagaagttctaaattaatacattattaggaaaggtttggctggaaatagttagcttcctaacttagcttatgaaatgctccaatgacatttattagaaaaaataaaataataaatattaagctatatgaattcttgtccatatgcaacaatatctgaattcttttcatgttaccagacaaatcatagttgtgattcttgtttatgatcttttgatcagatttacagtcagccgatatatggtgctgttgacagatggtgttcaaaaagataccccaacagtggatttgtgaataatttctaccaattgaaactgcctcggttgccagcttttcagctaaacattttcaggatatgttttagaacagcctatgtggtttccacgactggacttgctatcctatttccttacttcaatcaagttataggagtgttaggagccttaggcttttggccattggctatatatttcccggtagagatgtactttgtgcagaggaaaattgaagcttggtctagaaaatggattgtccttaggaccttcagctttatttgctttctggtgtcattagtgggtctcattggatcacttgaaggaataataagtgagaaactaagataatgaagggtgcttcatttgtttgagtttattgtcttgttgccatatcttccatgtaattcagtttcacattaattctattactatttactattgagagttaataaaggggataccaattatgtggggatgtctcaaagtggtggtggtgtggacgtggaatagttctgtttggtgaaaaactccctttaaagaaagtgtatgctacacaaacaactctatacacataaacttgaattgatactggattattagatttagctcaaaatttgtgcaatgtcacataactttgttttacattgacataatataaagtcatcccaaataactagtgtcctaatgtattggttaagaaatgaataaatattttttttattaaaaaaacatgttgaaaggcatcaaaaatcactatagaaatccattaataagggtatacagaaagatgaatgtcaaaatgtcagatgcaaatgcacagtttaggaatgaaaggccctcgttatcttaatcattcatatattactttatcattaagattaacaaaagagtgcccacacgagcgtactataaccaaaaagagaaaagaaagaaagaaccaatggaagcttttcaaaataaagaaaaaacacaaccctcggcaatagatagttctgaaacaatctacactcttcacgaattatacacgagcgtactataaccaaaaagagaaaagaaagaaagaaccaatggaagcttttcaaaataaagaaaaaacacaaccctcggcaatagagagttctaaaacaatctacattcttcacgaattattggtcggtataaaatcaattggccatctttactaaatgctttatatccaaaacaaaagttcagttgtagtatcattagaattcattaagtagtactaaagctgagcatgactatgatttaaccaggaagccaagagtttcaaaatcacaaaatcaaattataaaataacttgttcaagccacgaggaaatcaatatcgagctagtagagatagtaaattgacaacttgagtgaaaatatcttccatgacagcatagttagtttaaggaaaaacttaaacatagctagaaacatcagtatatgggcaagtttaatgctgctgcgatcctgatgttgaggttccagattcagctggggcatgtgcagcctgtccagaccctgtctgtgaagaccctggctgcatagaatgctgataagcatgatttgcagctggtggctgggatggagccactgcagcattgtatgaagatgggtactgttgataagggggaactggtggcatataaccatatggaggataatactgatgatgatattggccaggcggaggtggcatcattggatgggtataattttgcatttgctgcttctccaaactaggcttgttctcccctgacccagaaggcccaccaggaggaccatcttgagatgcaacaagagcacccattctttgaggatccatagatgggtagtagcttctttcctgctgaagaggtggtggtcctggtggattgttatagtaaaccattccttgtatttggtcctggttctgctgctgtgatatcactgcccgaggcaacaatccactatgagccacagaagcctgctgccttgcttgatcagagccatctgactcaggtttcgatgtctgaggcctgccccacatcagctttagcctaaggcccttaatgaccagtttgttggagagttcttctgctgccttttctgcaccttctctggttgtatatgttacaaaagcacaagcccgttggagaaccattttgatggattcgatttctccgtgcgcatagaagtgatcccgcaaatcctgctcagtgaccctagcatcaagtccacctacatagagagttttaatgttctcatcttcaggagcctccagagtgttcatttcccccgccttaccaagtagcttcaaggccactggatcattcaccctgaacgttttaaagcatgaacagcaaactaatgaagtcaaaaccatgaagcaaaattaaaaacaccaactactgcaactagaaatatcatcagtatctgtagtcacaaggaattcatgcagagaaaactaagaataagtagaggatacgttaatgagattgaaaaggaataatctttatacacatatagcactaaaatatagaaccaaaaggttatcctcacaataagatatttgatggctgttgactgtctgctacatcatttttggccacgatggaaaattaaacgtaacatattataaaggaatcaaccttcatccatgtcaaaaaaattctcttactacatatcgacaagtagcaaagtacaaagaaaacattcttaaaagtacgaaaaattacaggctaaggacaatgcaggcaagataagccattccacttcactaaatactgagaacaatacaatacatgacttcagtttagccacatatagaaggaaaaaaaagaaagccaaaattgcaagtaaatggcagttattagccactttttattaacataatgacaccgagctcttattgtagcccgtgctactgaatcagctgctttttttttgtaccaacaattaagaaaacttagtaagcaataaaattttgccactttggatccccaaatgttaatgtcaaatagtggttttgacttgtatatctgaccccacttggtggaacaaggcttgattattgttgtttaaaacaaagcttcctacaagcagaactatcacatgactttgctgggaaaaaaaaacctgcatgcttattatcttagctacacaatagttcgtcacacagaacaaccacaaaagaactaagtgagtgcctaataaaccaacaactatatccatcacagagataaaaaatgcttgagttgctgcccagtgccaaatgccaatacattaaaaaactaaaaaagagcaattgaaagagagatcgagtaagaaaagtcaaaagcaaataaggaagtcatttttaaccatacatacccataataacgatctttaatattttgttgagacaattccccagtttctggcatctcatgtctataagggcactcagctcctctggtacactcacccctaatgtagaaactgcaaatatgtgcccggtttcttttgtagtatggtgttgttctttgaagcttcatgatagtatcatttgggcgtactttaccataagaggattcataatctataccagctctagcctgcaccatgcttttattcttagtaaaaagatcacgatcaagtaatgaccaaagagaactgagtcaaaatagtagtcttatagattcttaaaaaaatggataaagaaaatttgaaattttaatagctgttgtcaatttagaatgtgaaaatcagagttccagggttgagaaattcttcatgtaaaaaaaaaaaactccaaaatattacaaaaaccatgcaagccacaaaaataacaattcactcatgactacatacagaatgactttaaacccataactagttttccaatcattaattatgttcagctatcataaactataaacatgacttagcataagaaaaacataccctacggtcatgctcttcagcaaaatactcccgattaacatcactctttggaatggcatcatgggaatcaatactgagagctgtgtctcggacttgaactggtagtccatactcaagatccagaaggcacacttgacagacatttttcaatttactacatgtctgacagatctcagttttcttatatcttgcatctcgaccaggtctccatctaaaaacagtgaatggccgtgtacaaatcttgcactccttgtcatactctgctcttgtctgcaccgaaagataagcataatgaaaagcaattgaacaaataattggattcccacaatctcatctttaatggaagatgctgaaatctgaaaattattaactaagcacattcacggactccctcgactccatagtttttcatagtacaccagtaaatcaactataccattttaaatttcaacattaactactctgtgataaaaaaaaaaaacttactgttcgatacttcaaagatgaaaaaaattgaaataattaagctctttcatttgaaaagccctagaagaattaagctaagatgctccaggaatccaagttcagacatttgaaaacaaaaccattggcctgcctgaataacataaaaggttttaaacttagcagttgccatctagaaatttctcattctcaggataaaaatactgcaaagcgcaaaccaaagctattgaacaaattaactcttctattcttagtagctggtcacatgacgaggttccacacattaaaatctgactcagtttagttgttccttcaacctttaattcctcactaaacaatcattatttttattatcactataactattaatattccaataataactcattcaatctcgcaagaacaaaagagaaaaaaaaaaaaaaaaacctaacaaacgaagaggatccgaaacagaccattcgaacataggggctgtcgccgaggcaggattcgcagatgatggggaagtcggagcgttcccaaccgtcggcttcgtgatctctgagcaacctatgcgccatgcttagggaaacaacgacaagcgcttgctcgttgaaccaaaatggaagctgaagaagaagaaacaagagattatggttctgtatttagcatgaaacaaaaggaccccaacgtcttacattacattacatctgaatcaatatatattgtcaatcgaccaccactactctaccagtagaacggaggtcggtggttgtttgcggtggccggtagaagacagtcagaggaggcaaagaaaggctaggtttcttacctttataatacagttaaaactttaaaagattagtagcctattacaaatgggtttcgattcaaatgtcctcatcttattgatagtttggagagtaaaattaggatttattttgtattcaaaatatataacacataataaatagaaaaaaatagatttgtttatttatattatttacatttttgaaataacaaaaattttctttaattaagtaaattaatatctattatcaattttttgatgagtgaaatttccaacaacaaagtttctaactttctttctacttctcacataaaaaattagattttaacttttttaattttttcaattctataatgagtgaaactctgataaattttctttttgtttctcactaaaaaaaactaacttgaacttttttaattttttctggtgtagtaaatacttctgtttataatgttaaaaagttatggagttgggccttttcaaagggagaaaaaaaaattatatctctttattttttataaaaataaaagttatctcatatatctaatttaataaacaataaaatattatttttattttatgaacaactttcacatttataaaataatactcttttttatattaattatataataaaataatatttcactagaatatttatttgattaaattctctaatttaattatcaaataaattattttcttttacaaagattgaaacattcatttcatttgtgcgtgaccctgtttcaatgttaaatcgatagtaaattaattataattaatttactaatcaaggtagacatctatcaacacccttaaagtcttttactttcaagaaccaatagaagaataattaatataatatttacttccatcatttacatctaaggttaactttagagtatattattattgtcaaactttaataagctaacacatctaattaacgaatgacctaagaaactcttttcttttttcctccaattgtcctaaccaaggtcttaattctattatagagctcaattattacctaaagtttatggattcctttttaattaatcattaattctacaaatatttaatcatatccaatattcattcaactattcatcaactagtgtcataaggcattaggtgttcaaaattaaaacaacataaataacttgttaattactatgataatctcatgtaaaaaaaattattatatttcttattgagaacttcctattgacatatcaaggtaatattaattattaaaaatttttaattgaatcagttcaatgatgacattcacatgtacattatctatatatgcaatttaataaatgagatatattaatttttatccaataaagaccattacacatatattgatctatctagattatatatatcatattcacaataatcctacaataaaaaataatttagattaaaattataaagacttatttctcattatcataatctctatcatgataacaactttctaattttaatcaaagatttctcaaattaacaatttaataaaataataaatataataaataaagaacaattttttattaaaattaatgacatgatgaattgtatctaggacatacatatttatctccaacacctcgtaggaatagaaaatgtttaaaacttatgagtataactttcttgagaataacttatatctgaaaatatattatcataatctcttaacaaacatgaaaatattgattattaccttaatattcgtggaatctcttaacaaacatgaaaatattgattattaccttaatattcgtggaaataaaagaagatgacgtgaaacaatttttgtcttaatgttgaatttttgtttgatgtttatggcaattattgagcaatggcagctttgttaggtaagggtgaggattattggattctagttcgtgatgattggatttgggaactttagcgatgacatattgaatatgctcaactctttggctcaaaacaaggtggaagcaatctcctatttgtatgtttaaaataataagtagcaagttttgataattggatatctattcttgacatggattgtgttattattaataggtaagatgttttgttggtccactttatccaagtttgcatttttttcccacttagtagtcaacccttaactattgcacataattgaatcattgctattggataggttcacgatttttactttgtgcaagtatacgtttttcaattattttgtaatttttagcattgaaattctgtcaatttgtttgctaaccttatttagttgtgtcctcttataggcttatttaaggaggaagctcccctaactcttactgcaccacaaaggcatagatactacggtgacagcttgaatcgcatacaacaaatcaattcttcatttcaaattagaatagatgactatgtagtagatataactagagatttattgtaatcattttctcatttatatttacttcttcataatatatagattgattagttcgacttattttgaactttgatgattaatgcaatggaattggtttctatgtgatattatggatactggtttggctcttgttgttttgttttttgttttttcaatagctaagtttgtctgtcaaaaaatactggtatatgtcaaaatacagagcagaattggacaaacactctttgccgctgctgctgccagatcaaaaccttatgccactacagctgctgttggtagcaaggagagttctttgaggcagacaggagccctgacgatgacaaacctgttgtatatggtatgcactaggcacctcttttgttcgtttggatttgggatgacaatttttctctgattttcattatgatcagacttgtctagtacaaatatttctgattttcttcattgacctttgaaagttgtgccgtttttttgctctggttatgaatttgtttacttttttatctatttgttgttaggtcggagttggaaggcatcggaattgcgtctaaaatcttgggaagaccttcataagttgtggtgtgtgttgttaaaggagaagaacatgttgatgacagagcctgcgttttcctaacctgagcgcatccccaaggtattacttcacttcttttcccttgttctgtgttacataaatgttgctcttggccttttcttacccttagttatgtctacgtttggcatagaaaaatcacagaagtggtgcttttatcttattttcatgaacaatgttttgtatagatttgattagagagaatttgaatgttgcatgtttaactctataatagatagtgttgagattatagggatttaggtagggaaggaagcagagagaatacaaactagtattctttttttttttttgtcatcctaattagggtctttgactccagttaagatattcccacaagttttggtcctttgaatcggtaatggaactaatttttggttgggacttagtcacactttctgttcctcttcaagaatgtattatgggagaatcgattttattagaaactaatattctgaaattgatattaatttgatgtgataaataaggaaattaatcagtaattctgtcaatttaatttgtgaaatcaggtgagaaagtcaatgtgccgcatcaagcaagtacttaccgagagaacaattgaagaaccggatcccagcagatctgctgagataaagagaatgataactgctctttgatgacttgaaatggatctgttcctgatggcatgttattggctatgttgttagaataggacattctaagaatgtaagattgctgacttgaggtagtttgtcctaaacattgtttacaaaagttattgatggattcttacttgattttgtttaagaggcagtcttaacagaaatctaatcaaccatttattgttcccagcactccagttatttcaaaaaggtgcatctcattttcagtcacccctcttatttttccatatacgagagtggtttacagggcaaaacttcggtggaccagtgaaacatatgatccattatggaccatatcttggaccggctatagaaggttgttttcgatattttatggttgcgtttatcatcttaaaatatattattgttttaatcatttagtctcgttctattttatagttgcgtttatcacacgaaatatattttattgttgcgtttaccacacggatctatattttatggttgatctttgattttattttttaaaataaaaaatgtcatttatggatcatatactaatatgtaaaaaacataaaacaaaaattaattatattccttttattttattctattttatttatcaaacatttttagtatatttttaattatgaaaaatagtattttcaaaaaataaaaaataaaaaataaatttaaaaacacactttaaatcctaaattgttttttggggttatgtgtattgtactaaggtctaatgtgcagtactatcttacgtaatttgtcaaacaacgatgcatgcagcccaaaccaacaacatacacttaagactgtctcagagtgcgagtgtgcgaagactatcttctataaaataaatgtaaaaaataattaaactaaataaataaagaaataaagtccgatttattaagacattatcaacgtactaaaagaaaaaaatatttatcatataaatcataaaaaatactattttttctaattaaaacatttattttcttttaactttttaatattcttatgatactagtcggcgcgtttgtcaagaaaaaaaaaaaaacggaagttattttatttcgctgactagtagcagcttttggcattacactcttggtaatccttccttctttttcccacatgggcttttgacatttttgcccatcatggctgtaacaacaacaggagaaaaatccaaattgtgtcttcccattttctccctgtgtggcttttatttaaggtcacaggaatggaagtggcaaagatgacatagcatctgatctgatataggtgtgaagatgggtgtgtcagctcagactgagtcaaatgacaacctcccactgttactcacccaatctctcaaaaggacaggtttgtgttgtgttgtcatctaaaatgttttgttttgtgcaaaagtgaatagattatagtatagtataactaagtaacatggtggtgtgtgttgtgaatgtgatgaagggacggtgtggacagcagtggcacacatagtgactggggtgataggatcgggagtgctgtctctgccatggagcactgcacagcttgggtggcttttaggcccattctgcatccttctcattgcttccaccactctcttctcttcttttcttctatgcaacacttatcgccatccccatcccgaatatggtcccaataggagtgcctcctaccttgatgttgttcatttgcatttaggtacgtacaaggtacaattccctttcttttcttctacaatttaacatcgactcttgtgtattgaaaaaatcttatgagtgtctccagatgaacgatcgattatactccttccaattacctcatttggaacatttaatatggttctatagtctagaatgttattttataagataagatcctctttcggtggtaacaggattaagcaatggacggctcagtggccttcttgtgaatataagtctgtatggttttgcaattgccttcgtcatcacaacagctatcagcttaaggtgtgttgattcatcacttatcatactgcttcctctcctgttctgtcatttccttttctttgttcttcttttcatccgtttgtgcaaaacaagatttttacactggtactccactaaggaagcatgtgtctatcccaagaatctcaccttatgttgccaatattaaatttgaactgctatttttatttgtggctgcagaacaatccaaaattcattttgttaccacaacgaagggcctgaagcagcatgtgaatctgtagatgcatattatatgctgctttttggggctatccaaattgttctctcacagatacccaacttccataacatcaaatggctgtcggttgttgctgcaattatgtcctttacttattctttcataggactggggctttccattgctcaaatcataggtatgcgtatggcgagtctttgcttaggctcacaatgactggcttgtgcatggacgtttgcttgaaaaatatatattggactaattattatgtagaaaatataattttatgaaaaaaaaattgctcagaaaaaggacatgctgagggtagcattggaggaattagtacctccagtggagctgaaaagttatggctggtttctcaagcacttggtgacatatcattctcatatccgttctcaacaattcttatggaaatacaggtacataccccgtgaactcagataaccagaatgtaacttgaccacagctcgggggggtggggggattttaacaattataaagactgatataatctactgcaatccttgaaggatactttgaaatcgcctccaccagaaaaccaaaccatgaagaaggcctcagtaatagcggtcaccgtcacaacattcgtgtacctcagttgtggaggtgctggatatgctgcctttggtgataatacaccaggaaaccttttaacgggttttggatcatccaagtcttattggcttgtgaactttgctaatgcttgtatagtggttcacctagttggttcatatcaggtacatataaatatagagataccatgtcaataattcttagtatggtgctcccatttaatatctcttcaattcctatattctccatcacctgtcttagggtagtgtgttatgaaatcatcatatagtctacttgtctgtactattatacattatagaaattagaatgcatgttcatttaagtgtcatctaacttgtttggtgcaggtgtatagccagccactttttgccactgttgagaattggttccgttttagattcccagataatgaatttgtgaatcacacatatatgttgaaactcccgttgcttccagcctttgaacttaattttctcagcctgtctttccgaactgcttatgttgcatcaacaactgtgattgcaatcatatttccctacttcaatcagattttgggggttctgggtagcatcattttttggccattgaccatatattttccggtggaaatatacttgagtcagtccagtactgtatcatggacgagtaagtgggtactgcttcggactttcagcatttttggctttttatttggattgttcactcttactggatgtattaaaggaatagtaactgaaaaaataggctgagaagctttgagacctctccaaggaattagactcagatagcctactttattttttcttccactttaatcgttgcaatggcctttccacacattcactcagttagtaacttggaaccattagatgaagacacgatctttattgaacggttgcaaatgcaaggaataggagactgcactgaatccagttggacattaaacatgcagattctctcatattttcaataggactggtggttctgtatttggtaacatgcggaaggtatccactactgaatgaatgaactcaaactcaacatttctacttcctcggttattcttccactatgttatacaaacaaattgaaagtggactttttttctatttcgtggggaaattttcagctctaattgattttttgttttaagtcttatcgataatatttagattaagccaagcttggtataattacaagctcctcacaagtgaccctgcaatgttgttgaccttttacttcagtaactttggtggaactcgatcttggctttggatgggattccctattgtaaaaaatacagtatttaatgtactaaacaatctattccctttgttaaaatttattgttaaactgcaaaacatccatgttctttgtatttccattcagagcatgacaaaattggagtatgtcaagaaacgtgaagcattctgtttttgatttacccaacagttactgcaagtttcgttaactagatgagatcaaacattcaaacttcagtcgaactaatgacctgatgacacacaaaagcaaggtaaaaaaaatgtcaaaagcctaagaagatgcgaatacaatcatgcagcaaatctcttataatgtctcatatttaacattaataaccggtgagttacataaaataaagccgccataggaaagtgagtcagtagatcaaagagttcttttcatcaagtcttctgattcgttggcttgacttagctcactactatctttgtacaaaatgcaaaagagaatataatgaaggactggttgatttcaacgacacaaatatgatggtccaataatcattcttctccccatatcatgaacagcagaaacacagccaagaatgatttgccgcttgacatgcaaattgccaatgtttacagactcaacctactactccactaattatataccaacctcagcatcaaacttcatgcaatggtttactgaatggcaagacgcctctgtgaggtgtgctccgacgagatgcttccccgttgttgacctgaacagtccccttcctccgctctttcacctgagtgcaaacaaaaagtagatgatgactgcaaaacatttgcatagttgtgttcttcaaatctctcatgcacttgagatcctcttgcatcttgttgcacactaggcgaattccaggtctcggcagaatcagagggcagtgatccaaaaccagatgaactaattgaacgtgacaatgggacttggccagtacccatatccttttccttgttcatgtggtttgaagccttaacttcagttttctttgcaaaacgccctccattacctcgtgctcttcttatagcatgctgatgccgggattcatgaagataaggctgtgaagaaatagaagttagtatagtatgcccaaggatcgcagatttgcatgtacaaaatattaagtacacagtattatactagaagccaacctgtctcattaaaaacaaattttgatttttgacacgtttgtgtaaacctaaatgaagataacatcttattcttcttaatttattgagtctttcaagatccatagcatttcacatttaggtaaagcagcactcttgttaaaatcttctactgattttcaaaagttcaacggttcagaggttactagatttccaattatcttactttggtatcctgtgtagatataaacacagttaaaactccttcatgtcaaactaaagttttagctctgcagaaaggaaattggttgtagaacaacctaaaataaaataaggtgacaaatatcccaaacctgaaatgtgttgagatatcactttccaaaatagattaaggcaattaactacagaactatagagtaacaatcatgcctacagaagcataagctagtgcacatttgtacctttctgacttttattaatttcttttcaagctctgctttagcacgagcctgtcttcgtctcagaattccttggtattgtttggcattcacataaacaggctcttgagccatctcaaggggcaaagccattctggcatgaggcattcctataaaaggagcgtatccctaatagtgaaaatataatatgttataccattgcagtgatatcccaatgtcaccattgtttgaaacagaaaaaaaaaaaaaaaaacaaatagcatgaaacaaaattatcatgtaataagaatctatccttcagggttatgcacaaactacatttctaaccagattgatttatgggaaatgcaaaacagtgagtttgacaaactacatgtaaaaaaaaaaaaaattgtatgagcactggttagtctcacatgccaactgttggtgcacatgtgctaccatcatacccccgtaataaggatttgaagcacatgcctgtagtaaaagaatttgaagcatactaggatccattagaaaagcatgcaagatttgacaataatttttccaataattgaattttcatcattgacatgctgaaatcagcaaacatttattctattaaacatagtcataaagctatgatctttgcaccctctcttcatgctaaaaaataaaaataaaaaaataaaaaaagggcaaagtcttacaattgagtggccaacaagttccagttgtggagcctgtgtaaggcaatcatcacgcaccaaaggtgcagatgatgaagaatgttgcatcgcttggtggtcttgtccataatttccttccaagaaaagaatattgtatttcaatatccttgtaaccttgtaacacttggactaaaataaaaaatcaaatgaacataatttgggccactatatataagcaaattttttctttccttattttaatgcttatatttttctttacaatcaatctaaatcacctgattgattaggagcagtgggttgtggttctttagtggcatcatcatcttcttcactggattctgaatcaccattagggcgttcaagtgaagatgaattagatgcattcactcctgacattgcttgggggacaggattgcactgaatacctcgccaccagggttcagaataagcatggttaggtgtaaaggaatgtggatcagacctcagttgatttgcagtttcagatttggattgcatatcttatcttcagatccctagttccctacaaatgaatattggattacaaattttattccttatgctaaaacaaaaggcaagataaataaaagtttataatgacagtggttattcccctttacaataagagaccctccaatggaattaaaaaaatggataaacaaggtatttctgaaacaaaatcacgtgaagtgaaaactatagccataattgtctcaggaacgttgatgtccaaatcttttagaggtacaaattgatcaatgagatatcaagcacaactcacagaaagttacaatggtgctactgctagttcatagcttcattaatgaaaggctcttaaaatgcagcatgctgattgatagtaaagccacattaaaaagtttcatagcctcatgtgtgaagttataagacatgtgcaacttacagaaaattgagaaacccaaattcaaaattattaaaattcatcatgaaatgatataatacttcttaagcaaacagaggcttaaaacaaaaatagtttccattttgctcttacttgatcttcagcaggagccgcagctgtttgaaggtaaatataaaatctttcaactcttggtcagtgcccagcaaccaaatgcccctagaagaacacaatcataatcagcaacagttgtttctgccatatatttaggcacacaaccaaacagcaccaggtgatatactgatattccaacatgcaaccatagctagtgttcacataagcagatacacactagctagtgagctacatttaatagaaaataccaaaatttggagtttatctgatcctagtacatgcaccaaaatcccaattctcccacatttgcaaccagaaaacattcacacatcacatgtcatagaaaaaaaataaggtttgggtaatatcttgccagaattcacacatgcagacacagaaaatactaaccctaatcctcaaaaccccccaaagagaatgaatcacaattagaccaaatttcccaattgattaattaaggaaattaagggggtgggaaggcaaatcaaagaactttgctttctctataactagaatttggggtgctgaatgttgatatctcacttcagttgtgatatatgaggataaaggaattcattcacgagtcaaagtgaaaataaaaaataaaaagtaaaaaaatcttaacaacaatagcaaatgaagtccagtgttgccttgcctgtttaaatttcaagtgacatcttatgatgacgtcagcatcaagtttcacggaggagacacgtggagagaaatgggagggaaaagggtatctgagagggggagggtgggtgaggatatcagagcccctgagaaggaaaaaggaacacaatttatgggccacgtgacaggcacttgactagcagaatccggtgaacgcgtggcctaagggtggggaccatagcctccgagaattgacagcaatgtgaggcacgtgtccattttcctttgtaaacatctttttttagtttcctcggattaataattgattctccagcaccatataattaactctattttctttactttaaaaaagggggaaaggtgagccttacctgccagtgaggactgaggggacacctattatcacgtcacagcccataaacaattcaatttattattttattagtgacttctaaattaaacaaattgagatctcttgcaaaacgtggcaccacttttttaagttgttgtcgtttttttcttctttttctcggagtaatttaagggcttcgtctatttttcttaattattttaaaaagtatttgccttttattttatttattatactataaaacagtattgtgaaaatcgattcggttattgaaccggttgagatagtaggtcaatgatttagtggttcaaccgatggatcaataattaaaccgatttgaactggtctatattaaaaaatttaaaattatattatatatataaatatataactaatattatttgattaaaaaaatactcaaaaattcaaaatatcaattgaaatattaaaattgataatataagtaaagtatattaataataaaatagagttaaatagcaactaattaaattaaaacacaaatccaatttttaataaaaaaataagctaaaaagactacagaaattaataaaagggtacaaaaagcaaatggaggccaaagctataacctaatcctaataatataggtgttgagcagctgctgcttcttctctaatttcatttgcgtggctgctacgcgcttccattttcatgtgctgcacacctcttcctcttctctatgttcatcacctctcctcttcctctttttcttcctttccctatggcgcgtttctctcttcctcttccttttgtttttctgttgggtcatattcactttctgctgtgcgttttcaaaatcgggttttgaaaaccattcgatttgtccgatttggccggttttgatcgagtttgaccaagtcaactgcatgactggtttaatagcagaatcggatcggttatattaccgattcctgatccaaccggtccaatccgattttaataactttgctataatgtaagaatttaccttttaatcatgtttggttcaatctttgtttactttgttgggtcgaattcagttcggacgatatccatccacgtggaagatcacaagaaagtagttttctttctggtataaaatcagaagaaagtaatgaatttactctataaatttaaatgtgtttcaattttaaaagtgaaattatataataatttaattattttataattatattgtaaaaaattatagattttataatatttaagtttataaagaatgttttgaataatttaaaatataaaaaataatttaagtaaatggaagttattgaaatcaagcattatttaaataatttctattgtattctttaataaatatttatattttattaacactaatgtgcgatgagttgttatacgtatttagtattatttgtttgaagaaaacatactaattaataaataaaagttacgctttggtcacatatcaaatagtcaacaattagctaatgtttagtggctttctacaatgaatccttttactggtctacaaggtattattattattattattatatattattgctattattattattgccaacaacaacggtgagttattcatgttgtaagcatactaccaagtttgtctaggtgttaccatgtgtcaaagtcactctttttatttttattttcgcgaccttaatgtgtctagacacataatatacatgcattgaacccgctgttcgtccatatatatatatatatacggaattatcaagaaattattgttattattggcatattttgctgggtgttgttatgtgtcttgggttgaagttgaatatttttggattttggattttgtttatgatgtcgttatgtagatgtagacacgtcgtaaataaaatagcaggtttatctagatgttgccatgtgtcaaagatacctattttttaagttggtagtaatgtcatctttgtgtgtctagacacatgatatgtatgtagtgaactcgatgttgttttttcttttggattttgaattttgcttatgatcgtgaagtttttttggacatgatgtgtcatgtggattctcaataaaaaatattttaaaaaaataaaaatgttgatgtggtttggaacccacttatttaactgacaagttaacctgatcaatattaaaataataaaatttggtaatgttttagagcatcctattatggtaattagcttccaaaaatatcactattttaggggttaatttactgaattggaacatttttagaaactaccgaccaatataggattattttcgaatattaaccatatgggatttgttttgactattgatttaaataaaatgccagtcaaagtagtattttttcatgacatgtaagcatttttttttaaaatatttacctaactctatatttgattggatggaaggaaaataaaaaaagaaagaaaattttaaaatttaaattgagaaaaaagtgtgaggaagaaaaaatttaaatttttgtatttaaaaaatatttttttctttcatttttttaaataaacaaaaaaatatttcattaatcatattttttttcttttatttttttctctcattttttctcgtaccaaactaactcaaaaatcttaagaaatatttatgttagacacactagttgaaggactgacatgtccaacatatacactacatggactctagaaccttctattgtgtaccccatgtactacttgcaggcactattggcaatttcaattatattttttcaccacaaaataattacatgctaccttttcgcaatagcgcgtgttcaggttgcactgttgcttcccatttagtcacgttattttacactaaaaagtaaaaacgcaaatagtagtggcgaactggcatataagctccatgtctgcatgatgaattacgaaggtataagacatatttatattttatcagtgatagagttacttttaaaaataataatctaaagttacttatatgttatatgattacttaaacatatttttaaactaagagcatctagcacaattcattttactctgttgagttgttttaaatttttggtgtttaaatttgatttctataaatgaaaaatatatatattaaattttattttgtacatcgaaggaattttttatttgatacattggaaattaatctctttcaaagttgagaaattactaaagtggatataactattttcaacaaaatatttttcatatatatggtaagaaaattaaatcataatccgtatgcttaaaaaacttattgtctgtcaactatatgccaaattttgttagtttctatattgtatttaaatttacacataattaattcgataggtcagaaagtatggattctggcctctataatatgtacatcttttaggcccattttaagagatggtagatccatataaataaatttaaaaagttaaaaaaattgttaagtacaaccacccccacacaaatagatccttggaaagaatcatacatccttattcaaggatattccttaattatttctttatacgtgtacaaaaatattaccacatatcacatatggcacaccacacacaacattcaattcatttcttctattcctttactccgaataaggttttagaaaatattctacgactctaatttttaattttactttgttaagatttttgaagtatttgtaaccgtagttatatatatatttatctttaattttttacaatataaaaaaaacgacgaaactacgtgcaatcgtaatttaaaaccttaattccaaagtatctatctgtgtgcatgtgtacatttacacacgcaaggctattgctacaaataatgattataaaccaagtagcaaaaaaaaaaaaaaaaaatagtaacatttgagggacactatataagtatcgatcatcaattccactactcttattttatcacagaaaaataaattcccgtatgagtagcgacaagcgagtagagcaagtagcatttagcaacataaaataaaagcaaaaatatgagaaatttcttgagattctcattctctaataagagagaccccttcattggattctcatagactgtggggccgaactcagagacacgtatagtacagtcacacatctgacaaaattatttcagatttttaaaataacatttcacttttatttcattttttgtttgaaaaaccaaaaaccaaaatacacacacttattagtgggatttaggcataccaattacaacttatgaataaaaaaaatactaattacaaattattgcccggaattaaactcctaaaaatacagcctagatgtgtcaaaatacaatcaatacataacaaaataatttctccatctcatctcattatattttggtttgtctcaaaatatgtttcattttataaaattaaatatattaattatttttctcccatattatatcaattcgtttattggcatctgatcacctgaatattttaaagaatttataactatattttaactctttaatttgataagattaattttgccaacgatcgaaaatccttttatcgttataaatggaagggtcatctacccacacaagttttttaaagacaaaaggtacgtagctactaactaaatatcaaacttataaccatcatcagttgtgcagaagaaattagtagaagaaataaaataaaagatgaaattgaacagaaaggaagtatatatatatatatatatatatatatatatatatatgataatatgatcgactttaatttctctcagagcaaccacttgactaaactatgttttgttttgtagaattccaagctatgacgctcaaatctacaaccaaaaccaatattctttgcactcatcacagcacccttcaaattaaggtcagaaaatatatcttctatatataacagagaaaaaagaaaataaacttaaaatctatatctaattaggagagcacacgtacccctagctaaatttagagagagacaaatcctacaagttgttaccctcctaaagttagcagaaagatagggtgaataactgttcctaagatcaatcactccaaaatcctccaaggttctctcaaagcatatacctctcatttgcaagagatgtagaaaaaactaaaagtacataagaaaagtccatgcatgttctaaagtttcacgagatcgtctacttatatatatatatatatatatatatatatatatattaattagcaaacaaatgaaacgggaagatcttgaagcgcaaagcagaagaaggtctctatgtctggtggtgcatagaatggtaagggtgatctacgcaaagagcaatcagaaagcacccttggattcttctttggtgctggagggcatgttgaaacttctggtatccgaaacttttcacctttgggagtggaacacacagcagcagcaacatcagaatccatgtcccttttctttggtgtttcttgttttctctcttcatgctgcttcttgcaatggcttcttgccagctttcctcttgtttttttcttttttcttgaagttgttggttttgtcgtacttccagaaggaaccatgtcttgatagaaaatgcttgtgtgagtcagctagctataagctaggttaattaaaagaactggtaaatgtttctaaaacaaaaagctggcaattggaagaagaagcctgagacttaaccaggtagagaagatataactaactagtgtaacaggagaggacacaagcttatcctattggagagtgctttaaaatggaaatgatatatatttgtccaaaagaggattttgtaaatgctgaagtaataagtgtatgagacgaagctttagattgaataaaaatgaaaaggttgaatattatatgactgtgaaaaagattcataaattttaacttcaagtttttgattaaaatgtagtcttatatatgatttattattgatgtaaattttcttatgtttatctctcgtatgacaaaagaaatgaagtaatgattcctcaagaaagaatctataacattttgtgtagtagctgacaccgaaaaagcaactccttttactatgacacttacactaaagaatggacaagtgatgaaataaggaatccaagacgacaagatttctttaaaaggagaccaaattaatatatataaagataaagttgtgtataataataactctctcatgcacatttacgaaggaaaaatcttctaacacttactaaagtacgtaaattaattagtattatatctgtattctttttatctctttgttgggctttacctccatttaaccctaggtagggagggaaaaaggagaaggaattggaggcagagattttcacactcgtacatatatacgtcttgtcttgggggcctatattatggttataaattagaatggccgacaaagtggggtgaaaaagtggctcgttcaaatattctgggacctattggacttatatttggtgtacgatgacttttaagtttttggatcactaaaaagggtcggtgacacatccacactattcttttattttggagtttttaattacatgcacacattagtttgtaggctaccacacgtagctttagattttgaactttaagacctttatcaaaatagatttcaaaatttagtacaacttttaagaccttaataaattttgaactttaattaaaaagggaaatgataaagagtacgaaacaatttcaaccacatttattcaaaataattttttttctccacttatccctttctattggctgtaaagtcatttgaaagtcgtaacatttttaattaaagttatttattatcaaaataacattcctagctatccaaaaactgcaacactattttaattagtttatcaaatataaaaatacaacaaaattaatttttatgcaaaaatcaagaaatttaataactaaattattttttatcactatttaaagacttaattgtattaccagtccccacaattaatttatcaaatgagtggttttagtagttatatcaaatgggtgattttacaacaacaaaatttgtggttaagaaggaaaataaaaaatcttttttaaaggtaattttagtagtttatcaaagggataattttggtcctaattttctcaaatcaaatccttatatacttttaaaaataataaaatctagtccaatattaaaacttcaaatttcttttcaaggtgagatttgaacttagtacgctagtccaacatataacttttatttttttaaataacgatactacttatattatgtttggatagctatatatattttgtttggatagctactataattaattctgagacccaaaattaaggtgaaattttgaaagaaaaaaaatattaaaactatatattactttgactttcaatgtgatttttttaaaaaatctaatccaaacatgctaataattaacatacgtgacagaaaaaatgaatcaattcttcaactaaagacaaagaggggagggacaggagctatacgtgtcttcattttacaaataaaggtgtgatagttgctttcaattttaaacttaacgttaattttctttccaaattatatttgactaatcttagtagaattctggcatgtttgaataagcttttttgaaaaatatttttaggagaagaaaaaaattatatattaaaatatttttttattaattaatttgtagatattttttcatctgaatcaaaataaatttttattagttaatttttaaatagatggaaaattaatgcaaacatatgtttaacatgtttaagttctgcataaaacaaattaaaatgtagtaagtgaataaaacagttgagatttgagaaggatagatagtaatataataattattttttgttatctgtctacataaccaataacgctgagtggcccgtggccgagaagcagagttttgttcattgatccaaagctattcagccactgtcactgactgatatgtttgtctgtgaattatttaattgattaagagcgttgaaaaatagcagagtttttgtcttctagtcctcgtggcatcacctaatctaatcagaatcacacaacaccacacctcacagagttttcaaattgcttttttgtcgcttctccatatataggatcctactagaagggttttttggacagacgtgggtcatgcatttgctcctatacattaatttgtacacatattatatgcatatcatgccacatttaccactgttgaggtacaataaccaagaatttttgcaagttctaatcaattttggatagataaacacaagtcaaaaaggagtttttatataaataaaatgaggagtatatgctcattgactaaaaaggtcggaggagagggaaatggaaaaaaagggaagagtatagagtttatttataatctgcttgcttgtttaaaatcttctaaattcttttaaattggggtaactttaaaatgttgattaaaaagggggatttttagtgattacaccataattcctcatcttatactcattctagcaaaattcaaaaacaacaaagaggttttacatgaaaagtaaaaacgttcctctcatttttatttcttattagaaaaaagacaaatgttaatcactatatcctaaaaacattagtcaataaacttaaaagtaaaaatatttttgttgaaagataaaaaaaattacattatacatgatttttttcgttctcgtataatttatgtaataaattttttaatttcttaactaatgtttgaagacactgattaataatatctttaaaaaaattataaaaaggtctccctagctccaaattcattataacatgattagaaatcttctaaaagtagaatttatatttagtgtgtaatattaatcaattcaaattagcatatataatacataaattagaatcatgtttaggaaagataagaaatcaaagtatctaagttctattctcttattattaataatagttgaacaattccattatgttatccttgctagttgctagcacttggcaggaaaaggcaacacccatgtatatgctcagttgactcttttccttgatcgatcatatttgaatgtcacgcgcgatgtgtgtgcgtggattggtgacaaacccaagtgtgcaactgaattgaaaaaggcaacgttagtttgaaaatttaggacctcagaataattgtttggtcaagattcacttaaaaatccgagcttggttttccaaaagagcatgcatcttctatcattcatctgtgtttgaggataggataggatggtgggtggtgtatctgttgcggtggagtcgcacagttggccacgtttgtacgtggatgctctgggcaccagccctagtagtaccagtatcagtggtttgtgtctcaagaggaagcacttgttgaggttgaggctcaccacttccttcgttcagagtcacagtgttaatacaattttcaagaagcatcgcaggcacaaggacaagtctaagagactcactattgtcaatgagctcggtggtcaatatgaggacacttttcatgatgtcaaaaaggtactactacttaacatactcactcccttcataaattcttagctagtccgaaactataatgtgttgtgaatatttgaatgacatgtgatcaagtattattaattcttctaataaattgtaaagttttaacatttctgttaatatatagacattaatagtcagatgatgatccgagattatttactaatttctccagggtcattgtgaatgaatatttaattaattattttgctatgagtatataatatattcatgaacggatgtagtttgtaagttggggcaccttaaattttatcattaaaatattaatatattcttagtatttatttgtggtgtttgttaattatttttaatatttgttatatagttttcagtgtttgttaattatttttatttgtaatttatgcattagtacttgtttataagatgattaaagttattgtttttcattgaaatgagaagtagagtttaaccatatgtattttgtagaaatattttagtctatcttgtaacagtttcatattcaaagatttcaaactcaatacttatatctaaattaactctcatgttgtcatcatggtcttttaaaatctcatcccaagtttcagtaagtttttttcattgttctattcaatccagaatagtaatttggtctcactatttgtttgttccttggtttataattgtttgttcctttaaattttctttacaaaaaaaatttgcggaggcgctacccccaaacctcgccactaaatatgcagacataaataaattctcctgaatctgctactagtgtctctcttaattatttttcttgatccgtcgctgagtatactactattccttgcttgcaatttgactggcttcatcttttatttggatacagcaaatactcaattatttcacatacaaggctgtgaggactgttcttcaacagttgtatgagatgaacccacctcagtataggtggttctataagtaagtgaaatctatgttgttgtagctacaatgctaatttccactcaaacttctatgctcttctaattactatttattttagtttcaaaaatgatgtttccattcagtcacatgttaagtaagcttctaaattgttgactgaatgaacttgtgaaaaagagaagattgcatacattcaactgtaagtatctcttttttttattaattattgtaaaattagaactctttgtgtgcgtttactactccaaaacttgccactgccagcaatggaagtgctctggttcggtttgattattatacttgaactggtatctcgtagagagattcttgatcccagttgaaaagttgctctgattgcaccttatgaaaagttgaattaggattctctgcagttggggaatttccacattcacgcattcaactaatcagttgaatgaaaatcggacagactcgtattttatctcgatgaatctagcttaaaatatgtatccgaaatgtgaatgtgtgaatacaggaaatctatttgcataagaagtcttgaatcttgatcgataaagcggtcaagtagtaaatgcacatcgatacctttggcaatttctagttttctacaacatttatttggaccttaatagattattacaagcaaataataaagttaatcaactttttgtagacatagtataaggttaattttttagctaattgttagttgttttccatgataacagtttcgttgcaacaaacgacccgacagataggaaacattttatacgatccctcgcaaaggtatgtgctctgctcagttatatcatttgttgataattttcagagagtagggaagttgagtcttttgtcttttgattactctcttgaaaatttactacaattttgtgaactattacatgtttaattttttgaaattaaaaagtactataaacaacatttcaagtgcagctcaagaattgctattttaagctgttttttctgttcgttttcttcctatgccaaatgttaaactgccacaatgttttccaatactgatgctggttaaaagaaaaatcatcctcgtaagcatgctatggtctttttgcagtgctgaaaacactttcacaataaactactaccgaattactcggtgtatagcttaataaacgactgatcagtttgtgtttccttccattcaatacctccaattttcatgtctaatgcctttgcacaggatatatgttcatataattttctataaaaacatattgttttgataattacgtttcacaatgtgttacctgataacattggaaatgatgtcattatgttttttggctcgattgctaggagcaacatcaacttgctgaaagagtgatgataacacggcttcacctttatggcaaatggatcaaggtaattgaactcaaaattatcgatgtcaatctttccgtttgatctccaaggcatgtgataatcttctgtagaggggtgatgcactccaaattataacctttcttcacctcttattgccatgcagaaatgtaatcacgctgagatatatcaagaaatatctgatgaaaacttggagttgatgagggaacggctcatggaaactgtaatatggccttcagatgacacaaacaccgaaaaaatcggctgataagtttggactttcgatctcttcttttcccttctgtcttttaatcttacctctccctagtctaggtataattttttgttccaatggcaatctgtttctctctaaattggttatctgtatctttttctcttactagatttgctagtgatacgttctgtaaattgtgtatatctctatacctttccatataagatccattatttagatagtttgaaatgaaggatttacaatagggattcaaaattttaggcatttgtttgagtgtaaccaatcgctagaatctattagccatgttagctgccgcagtttatggaaaagtaaagaaattattatttcttccacagggttggtttactcaataccttgcacgatgtatgattcaacctcaagcagaattacaattatcacgacagaaaaaagtagaagtgcagtttaattgaaagtaattttcaaaagttaaaaacatgcttattttcaattattaattttcctcatcaataaaatgcttattttttaattttagtaagtaaaataaagttcgcaaaatgttttgcatataaagaaacaaaattagactatcattcaaaaaaactgaagacattattgtattttacttactactcatttaactcaaagaaattactcaattaaagattttttaaggaaaaaaatcaaacagaagttctaatttaattcttttacttgtatgctaccactgtaaaagacaacatatgcaaacagcatgaatacaaagtcgcttaatgtatatattcctcctccccgccccccgttcttccaaattcattcttttttactagaattatgtcatcaaagttaaattaaattaaagaaaaaaattgagcaatagatcttatcttattatgttttttggggaatcatatcttattcttttgaataataacaagttgattgttttcacctttcaaaattttaaaatttaaatacctcttatttcaaaaatcaaatagaatataattggactacctttaaattaaaataatattatcttgatggctatgtatataacattaattaaaggcaaaaaaacaacattttttaaattatatacctaaaaaaacatggtttgtaaattattgcgttgttacgtataaagtacaagtgctaagtttggttcgcagttctgtcaacaaaaaaaagtatggttcgcaaagaattttcattaaaacatcacaataatttacaaaatacacctcaatcattaccccttgacatgttgcttacacatagaatccaaccatttgtcaatatcccagcatcagaatgaaattgaaactaagttctaaaattggcatttactactcggtacaatactaaagcctgtaaatctacttcgatcttccgacttacaaaaggtaatacacaatgtgagcgaaagagaaagagacttcggggcaacctggtcaggagtgcttcacacactgctctgactggttcaaaaaaatacaagtaattttagacacctgcaaagcgaaacaagaaaaaaaccatgtatctcaatttgacacagtagaacatgatacatattgttaaaaaacttcaagagaaacatattattgataaactagtaccagaacaaaaaataaagctaaaaacaggggcgagcaagtatgaaaaataatgaggaaaaaataaatcttcatccccaactaaaagactacttcgcagttgagcctaaataaatatgaacaaatctcaaagatagaaatagaatcatcatccttatgaagtgcctatataggaatatttaactacaaccaactttatatcatattaaccaattaaagttaagcaggaattaacaactaaataacagtcaacaattccaattttcaatagcatatttagtaaagttttccagtggcctgcataaatagaatagaaatgaacctctaggaaagacagcaaggaagtcattgaaatacatccactgaagcataccatacttgatgctgaagcacaaggccgatacaccttacatataaggtgggaattgggagaaaataaaatctatcgagatttctctttccctgcagcccaagggctttgaatggagtaactgattacaattaactatcaccaaaagtaataatctgcccaagtgcttgtcttgcacgaagctgcatcaaaaaaaaaaaaatctacaaaataactaagagaagtatttcctccagactcaaatataagcaaatctaaactcaggtatggtggtccaaaatataagtaaatctaaactcaggtatagcggtccaaaatataagccaatcttaattgattccaccctatttaatgaaatcattcccaaaatgccttttatttaattcaaattttattttcaatggctccttttattctcatgatatcaatcacatggcttttaaaatggagagagtattcccatttgaaacatgttcccagagaattgaagtcttccatcaattagcacgaacgatgatttaggaaatgaagttcattttataaatgagatataagaaaattaaacgaagttaactaacattcttaattagcgagaattagttattctttacttatgtttgactccaaagagagtatagaacaagaccagtttgaaatgaagattaaaagaccttcacatccatgcaaggatcgttgaccatcttcttgatttgagaaacaatgcctacattaagcagttttacaatcctaccaaatgccccaggacttgcaggaaaagtgagatttaatacgacccaaacagcagatgtgcgtaatcgactgtcattgctctgcagaaactggttgaagaaagagtgagacacattttctgcttttgtagagagtagctgcatgatagcttctttatgagactcatttccacttgcaatattgctgagtaagtacatcccctacacaaaataaaaagataatcagcttgaagattaagatttcaatacaattgcagttttcttttttcatatgctcattgtgttaatttgttatttctatcctgtcagggaaaaatactttgttcaccctttacatttccctttgagatctccaaaatttattaatttcctctatttttctctcccaaatagcattaacagaacgcatagttatcaatcccggatagcggagcggagcggccgccctcaaaactgggatagcgggatagcggtagcaggatgaccgctattctcatgttttcatatatgtattaaaatatttataatataaatatgtaagagaaatataactaaaaattcatgcactaattgtcattaacaataaaaactagtcaaagaaacacaatgtcaattaaaatttgccaaatgtaactaaagttctagaaattcaaattcaaaataaacaaacacaagcttcttaaatcttaatttaaatcatcatcctcttcctcttcaacattgatgtcattgtcttcttcatcactcccactagcactagaaatgtaatcttcctcctcacccaaaaaaaaagaaaagagaaataaaaaggaaaaggaaaaaaaaaaaaaaaaaaaagaaacagaatggcaaaatcacacacccataaaaaaagaaaagagaaatgaaaaggaaaaggaaaaaaaaaaaaaggaaacagaaaaggaaaaggaaaaagaatggcaaaaatcagccaaaaaaaaaaaaaaagaaacagaaaacgaaaagcaaaaagaaaaggaaaaaagaaaacaaaataaaagaaatgaaacagaagttacagaacgagaacgagaacgagagaataagagaaaagggagaagaaagaaagaaaaaaggagaaaacctgtagatggaatcgcgtcggagggagaagcggcgccggaggccaagccggagggagaagtcgccggagggagaaggttcaaagagctcgcagtgggagggagagagaacgcgggagggagagcgaacgggagggagagagaacgcgcacgtgagagaaaagaaaacgataaaaggtaagcggtttaggcccaaagcccaattcgcggccgcgtctccgcaatcgcggacgcgacgccgcttgtcctatcgcggccgcaatgaccgctatccttaaacgctccgcttcagagggtgttgtagcggcacccagccgctccgctccgatgcgccgcgatagcggccgctccggccgctattgataactgtgacagaacgttagaaccatgctctcaaaatgaagtaatctaaaggtatagatattaatctcaaaaatgccttcattgaaccatacaagtaaggaaaaatgatgaaggtggatctcctgttggctgttgcccaccataaacattttatgcaactgatttacagtgttagaaatatgacaaggacatagaggctctgataccatgcccccaccatgcattgtccatgcttcaagcccatagggcttttgcatgaggaagcatgcatataaaaatcattctagtgtctttatctaataacttaaaaaatttgggatagttgattcttgataattgcagtgttatcaatgggggatggcagaatgtggtagaaagccaaaaatccgccatacaaacacacaattgcggcctatagcactgccacagtgggcctcccttcaaaaattgcctattatgacagttggtaaaaaattcaccacgctgttctgccatatgggtaaaacagcttttcaatacagcactaactatgctctgacagaacactagcataaaatcatgagacaacataataaaaacatttgatgaaacctttcccttctccccaacccaagtgcttgcacctcctattgtataacaacccaaaatagagggaggaatgagatataaaaaggaggaccataacataatcataatatgtatcattaagttggaacattgataccaatgtacattgtaatgcctgtattccaccaatgactgtttcaaaagttttacaatctgctaaggttagaaatatcccttcaagtcgtttgggatgtaaagcacagttttgcaagtgactgttgaacttatcaatagcatgtacctcaaatgctaacttctgcaaatcttctttttctgcaactaaacttgaaaaggcaaaggaagcattgtctccaacttgaccagaatcatcaaggaactcaagtaaaatatgtaccaatttggctttgattcctatgtcttgcagatagcaagaagatgaattctttacactaatcaggcacaagcaggctagtaacctagtccaagaatacctgtccttggttagttcaattaccgaactcaaagctcttccattttgaaggtccacaaatttagagacaacttctggattgtttttaagaattgcagtaagggattctaaactagaatctcgctggcttagagaaccatcaagaaggctaataagtgtttctaaactaaagtaccagcacagcataacatattttgttcatctcttttctcagaagaatgaataacaatgcttgcacctagtccagtaagattttcattcccacttttcaatagtgaaagaagaaattgcatgtcttgttctttaaaaaagtcatactttggagctagttttgatcgataaatcattcataaagagcatgcagcggcatccacaacctgaaatcaaggggaggcaggtctattagatgacattgggaaaaaaatacagtcatatcacatacttatcacaatgataattaatgtataagggttaaggactggtatgtttgttctacctactacatgccacaaatgaataaaaggcataaagaagtcttgaaaaatattcaacatttaaagatcaaatagaaacaataacaaatgcacttcctgtaacctctgtccattcatcctagcactaaaatatgaaagcaaatagcttaaaacggaatagatataagatatacaaagtgacaatacttggtaaatcatgtccacaccccactgactgcattgaactagaatgaatgcctacacaccgttacagccaattcataaagattatagaagcattagatcataatacatttattttcccctcacaactgctgtttatcataaattaattggctttttgatatttcatgaagaggttgtgtctacaaatcaaggggactcttcaacacatctggtaattagaagccaacatacatttcttcaaatcaaggatgattttaccatgggtgaaaactaaaggaagaagtgcaaatcaatgtatatttgtttgtatttgtaggcaggtaaagagataggcatgcaagaagagcgggtaaaacttctgttatccttaccaaaaaaatttcttaaagagaaattcaaaatgaattgtcaacagcaaaaatgcccactgcaagcagccaaacaaaatcataattttatttggtacatgtacggaaagaaatacaaaggaactaaactagagacagaatcagtgcctaacgcaacgagaaaaagacaggtggcagcttccactcatgcgtcgcacacctattatttgtaccccaccaagccaacaaatcggtaacacaattaatgtctcgagacaccacattgagtgagacattccagcccctcccaatgaaatcctgaatccgacaaattacatccccatgcacatgccaatctattcactcttccatagattcttcagctgcattcctgcagtctgttttgcacaccacactgtgatagccaagattccaacagacttccagaccatgctctatagccaaaagttctgaccttagagtctccttgttccaaaagaaaaataaaaatgcttcatgtaacggtagtaaaacataagttaccgggagattaaccattggactcctctttatttccaattgtaccatccaagttttggcccttccaatttctctacctatagatgaatttcgcaaacactctaccgctccatttttctatccctttctatctctaatcagtgtaccgcgttcatcactaagaaagaaatatatatagttttagctgtaataaacctagcaagaaaaggagagaaatagaatacatcaacaactcgcaacttaacaatctagcatgcgtacactctacaaactgttgttgattatgagacaagcacatagctattttcacgcgagctattcaattcctaatttccaatttatcaacatgagcaacaatgcaatataagcagtgcttcctgatttcttcttacaattgcaatttcatcttagcaccaatgtcagagaaaccaaacacgcaaaagaaatttcaaaaagaaaaaaacgctgtaattaatcgaattgaccttgtcgtcagcggcagagaggagcctgattaaatgagggaatgctccggcgtcgaggacagcgcggacaccggcgtcgacgccgtatgcaaagctgccgagtgcggcggcggtggcggggacggcgccgagcttgatataggagagcttcttggtgcggttgccgatgatctggttcttgacctcacgaatggctttgagcttgatttcgcagtcggacgaggcgagacggtggaggatcagatcggaggagggacgccttgccggcatggtggcggcggaggaagctcatgcacggcggaggagaaggcgcaacaaccttctaattccacaattacgatgccgacgagaaggcgaatttatttatttttaattgtttcttttacgagaggagaaaaaacaggggtaagagtacgagtaagtgcgtcctttataaaaaaagaaaaaagaaaaaaagaagaagaagaaagtgcgaagttttaaatttatgaacggaacggataatagagacttagagagattggactagtgttgttcaagctggaccccattgtagtatttgaaaactggcgccctctctttcactttccacttctatactcttttttataggtttttaattttcgctaaattcttcttttagttaattctgaggcgttgacagtaacgtgtttcgggtgcggtttactttcaataatcaaaaataaatataaaataaaaagatgcgatttgatttagatatatcataaaatctgaattaagtaaaacaaatcttttatagtttaatttgacaattttttatatttttaagttattatcacaatttaaattttattgatcaaacttacataattattattatgttttattattttaaaatatttttttattaattttgaaaaacatattttagttaaaaataactcttttcataacataataataaattttacatcagttgatatttaatactgattttaaataatattagaatttctttttttaacatatgaaaataatatatgtatcttgattacaaaacaaaaagaaatatcataaattatttaattcttattattaattattatgatatatatatatattataaacttattatagaaaaaaaatacactataaatcacatactataataattaaaattgaaaaactgtctacataatattaaacatccattcaatgaaataatataattgtaatgtgttatttggttagattttaatgacaagatcaaaaaatcaaaccaagccactaaaagtatacggtttttatttattttttttgtaattttcagtttaagcatttttgttttttttttttatcaatttcgcgtgtttatagatattttgtaacgcacatgaaagaatttagtgctggtgtatatatttaatgttatcctatgattggagtccactattgaattttgaatgtgaaaagaagttgtttcttcttcgaaaaggacaaaagaaaatataatgaaaaagttaaaggaaatgggccacgacagcttcgatgatccttctagtttactcttaatggagcatatttggattttgtttggatctctccaagtgttgtgtgaatgccttgacttccacgcatccgttggaatgttttccaaggccagaatctgtcattcctgattgcctaaagtatggagtacatatcttaagaagatatctttaacaaatttctttaaaatattaattaaataatattaaatatatttagaaaatattgttaattatttttgaataaatattgaataacttttatatttgtttgatgtatcaaaacattgaatacatgaacactgtttgcataaaacaattttgaaaaaaaaaatactatccaatgtctcaaatatttgaactaaaaaaattaaatatatttaattatttttaaaattacttccaaagaaacataaaatattttagacttaaaacagagtaagaaaacttcgaagtatttcatcattttttcttttgagctttatttataaagcgtttatttctccaacatatactttgttgattcacattcagattcaaaccaatgaatctgtccacatatcacaagcttactaattgattcgggaagaattttcttatggtctctttcaatttttatcgttatttaagttcgaacacctaagtgttgttttatttaatgaaatataactacacaaactttaattttgcctccaccaatgagaatagtacttttgaaagataaaaaaggttatctcctactacacaatttacactcacaattaaaaaataccgaagttatcttgattaaattctaaaaaaacatatttggtattaaatgtctagctactatatccaacgcattattatcaatcgatcacatgaaccgtaaacatattttattttcctttatatcattatagaaagttgttgatcccattcaatggagaaagataaaaaagaaacccagataagtggagacagaattaatattaggaacttcaagatccaagatcgaactccatgtggcaactggcaacaatatttagtcaaaataattcatcataccagttcccactaattttctgcgcctacttcaaagcattatttttagcccatgtgaacatgattcttatccctcaaattttcaacactttcgtttacttataggctaactgcaaatatgtgatccacttaatttagatctacttgtgttcatatagtgtgtcaaattcattaatatatctatctcattttatttttatttatcactttttaaaaaaatatattaattatttgttttataataacactttgttgtgatgcaggatagagctggaatcattgtgaaggtttcacatctaaggtgatttctcccacatggactctaataatcaagtcagaaatacttggaggaaaataaatgaaaaggagtgaatactcttatttgtgcaaggatatatttatatatagacatctttagcgcaagtgtagtcacatgcctaaatattttttaaatttattatttagtcaacttataattgtgctcatttatttcacatgccatctaaaatagtatggttgaaataattctcataacaattatcttcaagttagtgttactttgatgcaagtaacactaatgacttaaggtttaaggtggacacattcttcataacactcttaaaaaataaatagactagtaaaagtataactacaattatataaggaatttaataatttaagaaataatggtgttttaattagatagaattattttattataaaattaatataataaattaatttcttaatatatgtacattatcttaaacaataaaataagaaaataatgtaaactattgtttatttaacaattttgtattacttagctcaaaattgataagtggtgattttgaaagagtttaataagcatgcataatagttttcatttttgatatatagttattataaagaaaaataaactaatgtatattattagtttttttccttttacatattactctatatcagtaatatttataatattaaccaaaacagcacacataagtaagtgttaatgatttatatcttttaattaaatgattaatatttatttgaattcttattgatctttgattaaaaataaattatattaagagaaaaatatataatttgtgtatgtgttcaatatctcccacacaaatttgtcacactttcagacgaatgaagttcatatagcatgaaaaaaattattttccatgcaatccaaagtaggaaccttcaaataggagggtggatgaccccttactgcacgtccgtgtcttcccgtgccagttcctccactctacgtctctaccaaccagtccaatttcctttcctttctctccgttggacactgcctcttctctctctctctctcaattggcttttcttcccttttcatttattggggcagcctctctgcaatccacagataacttagattacttcgacatgctcatgtcatcattcccagcttttcatctgagtggtgagaaactaaattgccctttattgcttcctacgcttttctatgttgaaccatatttttttatattctagctatgactgattgcaaatttggaattgcttgctttggaagttctttcatttctattttgttgttcgtttttttgtaataactgcaagttttgtgggtgtgatttgtgaagggagatgagaagaactggccgagcttttaaaaaaagaaaactggtcttgttttttctctgaatttgggtgtcatggagttcccttcccctactatgcgagtttggacccttttcttgttcctgctacttctgaagagtgatgttgtgcaatcggcttctgattccttgattggtatgggaagctatgacattaccggtcctgcagctgatgttaacatgatggggtatgccaacactgagcaaattgcatctggggttcacttcaggctgcgggctcgggctttcattgttgctcagccaaagggtaaccgggtagtgtttgtgaacctcgacgcttgcatggcttcacagctcgtagtcatcaaagtaattgagaggctgaaagcaaggtatcaataatgacttctttgctctcaagaaataactattatgataataacttgtagaaattatggaagattaattatatgggagattttcttatatttctgtgagtggcagctggaccacccgaccgaataagctgccgaggcatagttgaccaaataactgcctatgcctttcaggctagaagcttgagggactatggaccattcggccgagtaagtaggtcacagatggctgacctacactagtaagtccgagcatttactatggaggggtcctaaggctttcggagtcaacggacctctcagatcttaaggccgaatataataaaggtctagatcctcctcacgcgtgactaaggcaccattcactccaccctccagaaaaaaaaagcaggaaccgtaggaggacacacttgttatataggcatgactaacccaggtcacactagggtatgattggtagagtctcaccagggtttcttgagttcatattgagctttaggattctccggcgattgtgttctctagcgtgaaaagcggctgatgtttccatttaatttgtttgatccctaagttttgtgcctgattttgtactttattttgtttgacagatatggtgacctatatactgaaaagaatgtggctattagtggaattcacactcatgctggtcctgggggttatctccagtatgttgtgtatattgtgacatctcttggatttgttcgccagtcatttgatgtcattgttgatggcattgagaaaaccattgttcaggcccatgaaaatctccgcccaggatcaatatttgtcaataagggtaagggaaagacttgtcattccttctttgtcctttctcccttgggtacttatatttgtatacagatgtgagcacaggtggataatttaaatgttatgtgtaaattattataattatggtagttttgcatactgttgaagcatgtcagaaaaagatgaaaaactgcaagaagcaagttgcaccaactgtctagaaataaatgaatgaggcaagcctgagctttttcttataggatgtagggttttcccatctttacttttcctgacatcattaactgtattaagaatttgtttagtagtattattttgaagctatcaatgtgatttctagtaagtgcactagttggtagtcatatggtttaactattatgtcatttctccctctctttgttgattatatcgcatggtttgagataaattatcttcaacttgcaggagagctcttagatgctggtgtaaatcgcagtcctagtgcttatctcaacaatcctgctgcagagagaagcaaatttaagtatgatgttgataaagaaatgactctgttaaagtttgttgatgatgaatggggtcctttgggaagtttcaattggtttgctactcatggtacttcaatgagccgaacaaactcattaattagcggggataataagggtgcagctgcacgatttatggaagactggtttgagcgaaaagggtctgtaagaatagattcggttggatttgaaaatgatggaatcccccgaagaatttcaaacataattcccagccttcatgataatcgtaagatgtttgcttttggctacaatgcatccattgataaactaagtagcttcttttccattacagtatgttcattacatagcttcagaatttataggtttatatgccacgtgatgtgggtccactgttctagaatgtttttgccttgcagggtaaaggcttcaaatgtggtttgaccaaaggatttccccccttttgtgttagaaattagaatgtataaaaatttctaatcatattttagaatatattagattatccttacagagaaatagttgctgtagaaaatcaacaagccttaaaacagtccaaagagaaagagcaatcaccaaacaacaagaggaaaatttgtactttggcaacgtgctggattgcctcttgtagttagttacatgtattctgagctctgatccggtgcttctgagttttacaagtcttctcatataagtcctaatattggtggagttaatggagttgtctacgaacaagacaagatgtaaataccctaaatgactgattgagaaaactaatgaaacatacatgaatgatatcttgctttatatatgtggcataaatagtttatcaattaggtgaatatatgatgattataataataattaataaatgaatacgtttctaaccccacttaaatttattggtccagaccatgaattactggaacttgctgcctcattccaatctcctcctggtaaacctgcaaccaaaacttcaagcgttgctagacgtgtgagaggtgtccttaggcaggttgacaagcctagatttgtttctgcattttgtcaaacaaattgcggtgatgttagtccaaatgtactcggagctttttgtatagacactggactaccttgtgacttcaatcatagtacatgtggaggaaagaatgaattatgctatggccgaggacctgggtaatttttattgcatgctcaatgtttctttgtttttctacaattttcctaatcctttatggttgctaaagtgtctcctataaactgatgttgcagttatccagatgaatttgaaagcacacgtattataggggagagacaatttaaaaaagcagtggagctattcaacggagcatctgaacagattaaagggaaggttgattttcgacatgctttcatagatttctcccagcttgaggtaaatccttctaaagtaggagcttctgaggttgtaaagacatgccctgctgcaatgggatttgcatttgctgctggaacaacagatggacctggagcttttgactttaagcaaggtgatgatcaggtaaccactgataagaccttatgcttacctattatcctggccttgtattcttaaatatctttgaaactctatgattattatttctaattgtatgtcagggaaatcctttctggaagctggtccgtaacttacttaaaacgccaggcaaggaacaaatagactgtcaccgcccaaagcccattttgcttgatactggcgaaatgaagttaccatatgattgggcagtaagttactcatttgatgttctttgatgatggtagtttcatgtttctcttcacccatttctgccataaagatatgctaccatcacaaggcatcttttttcaaaggaaatatttcttcatttggccctgattggaaatgctctcactgctgaaacaaagagtctgatttttgataacttttactaatttgaacctttatttgctcatgttcaattgcagccttcaatacttcctatccagatcctccgagttgggcagcttgttattctcagtgtaccaggaggtatgagctcttatttttaatttcttaaaatgatgttattgttggaatttctatcctttgcattttgaaacatttaagtttcaacatcaacaaccttggtcgaatgagaatatattgagtcaaagaagaaaaaaaaatgttgaaccgttattgggatcatgatattttgatgatgtctattccagcaatactgggttcaatccaaaggatggctgcatcttagttatgcgagtctctcactatttatttttgtgtgtctaaatgttttaagatccgatataatccaaaatccaaatgtgttgcttaatatgttgtgctattatattatatatggttttttttttccttgcagatctatatttatatttttataccagtatttgtgaattgtgagacaatctaatctggcctatgtatttctttgggtgcttcatgcttcctgtaattgttttacttctgacagaatttacaacaatggctgggaggcgtcttcgtgatgcagtgaagacagtgctaagtggtagcaaaggctttggtagcaacattcatgttgttattgcggggttgactaatagttattcacagtatgtgaccacatacgaagagtaccaggtgcagagatatgaggtcagttacaactcttgtggaaagagacatgaagcatgcagcaaacctttttagattgctatagcaagagtaaatgcaacattagtggaaatttacatttttagggatgcaacttatcatcaaataacataacttcatattggcaagagatgtaaccattatgtgctgctttatttaacttcaattttcatgttaccagggtgcgtccacgctgtacggtccacacacactgagtgcttacattcaggagtttacgaagcttgcgcgtgctctcatcagtggccagcctgtagaaccaggtccacaaccccctgacctccttgataagcaaataagcttattaacaccggttgtgatggatgcaacccctattggtgtaaagtttggggattgtagctctgatgttcccaagaactcaacctttaagagaggtgacatggtgtctgttactttctggtctgcgtgccctcgcaatgaccttatgactgaaggtacattttccctggtggaatttctccaaggaaaggatacttgggttcctgcttttgatgatgatgatttctgcctgcgcttcaagtggtctaggcctttcaaactcagttctcaaagtaaagctaccatagaatggagaatcccacaggatgtaactcctggtgtatacagaatcaaacattttggggctgccaagggcttgttaggttcaattcatcactttacaggttcatctagtgcatttgtagttgcatagtaaaggggggcatactgattgattatacatgtttaatggttcgaacactgtttctactatattgtggtttattgtactaaactgtggcacaatacactaaattaaatcaaggatgattccaccggatatcatttgttattcactattctttttctcctctcctagaaattctctgcaactagccaatttccttatattttcatttgggtgaacataataattgatcagagtagttagtcatttgtggcttacaattgctcttataacattgttaatcactcccatctttaattggtgatacatgaaagttttttataaggagttcttaaactcatcttttttagtagttattatataatttcggaccgtcatgatcttgggcaaacttcacgcgacacatataattgaattttattatttttttggtgtaaactaaaaaaactcaattatacaccatatggaaattgcttaagatcgctaccacatgatggtcttgaactaaacaagttttcatattataaatcggttaattttgtgaaaaatgatgcatttttgtgttttttttaaaggcttttagtatcattttttttaacagcataatatttagaattatccttattaaaggtagagtttaatttctatactttattagcttaaagttttttatattgaaatcaattaaaaaccatgacgagtagatataatttgaaggtaattattataaatgtaaactaactttttatatatcacagtttattctttatatatttgaattatattttagtggaataaaggaaataaacaaaatttaaaagtaaactcgatttgtttatacaatgatacgacgacgtttaacaagaacggttttctagtctctgccacactaggaagacgaagcagcagcatcagtgttgaatctcgttttcccagcagaagaagaaagcaagggcacgcacatcttctcagctgtgagtgagaatttggagagtagaagaagacgcagctgattgtggagatgtcagtgcaagattacctggacaagcacatgctttcccgaaaacttgaagatgccgtcaatgccgccgttagggccaaaacctccgatcccgttctcttcatcgtatctctctacctctcatcatctcttttcatttttttcccgtttctctcatcggaatttctcagcatgcgttttttcggtgaccgcagtcgaatcacatgagaaaagcagtgcaatcggtcataacgaaaatcaaggcgaggcagatcctcgatagcagaggaattccaaccgtcgaagtcgatttgcacactaacaaaggcgtgttccgcgcttccgttcccagcggcaactccaccagcatgtaagccttttattattattatttatttatcaatcgctctcgttcaattatcgatttggtttgttattgattcgattcaggtatgaagctgttgagttacgcgacggcgacaaaggagtgtatctcggaaatggcgtggctaaagctgttaaaaatatcaatgacaaaatatctgaggcgttgattggtatggatcctacgcttcagtcgcagattgatcaggccatgattgacctcgacaaaactgagaagaaggtaatttaacgtctcgctctctctgctatgaattcaatcaattggctgttgatttaccgtattacatattgttgtgttctatgctttgattattttacatttcaaaatgaatttggttagtgattaggaaaaatgctatgaaaaggtttaatagtcttaatagtatggttttactgtctttttcattagtccaggatacataacttttagtttttcttagttatgtgatggatacaattgggatagtgcttgctaggttgctactcggaaacaactctaagtggtgaaggtcgtagttttccttctgcatctccatatattttcacttttctattttctctctcttcattttccatttcttttacaaagtgctcccttaggctagtaggagaatttgtttggctgttggaaatatgataaattcatacaagatattttggaagcattatttgcacttcacttagtatgtgcatacttagtttccttttcagttttgaatggttgcttgatgaaggcagtgtgtgtcattgattcttatatcatacacttgttgcgatcagatactagtgcatgcttgttgaataattcatcttagcaatataggtctcccaatttttgtaagattatatatatatatatatatattatctgttctgtttctgattttctctgcagggggaacttggagccaatgctatattagctgtgtccattgctgcttgtaaagctggtgctgcagaaaaggaggcatgactctttaacaattaatatttttataagtttgtttaacttttaatctggaaaattagtatatatgttcagtcatgatatcatgaaaataaagacaaaaacatacaggttccactttacaagcatattgctgacctgtctggaaaaaccagcccaacacttcctgttcctgcctttactgtcataagtggtggaaaacatgctgggagtaatctggccattcaggtataatttctgttgaagtttaatttcttagacattctcatttgtgttttcataatcttacctccattagggatgtgttcctttcctccaaagaaactaatgaacagtgaaattaaatgattaatgttcaattatttttgttgtaactaacacctgttcaattatttatggcataactttggcaatttattgttgtgtttgattctgttctttattttttgagcaaacataaacagatatagtttctttttaatctgtgtttcttctgcttcatagttatttagactcttttaattatgaaatctttcttacataattcctattaggaaatcatgattctcccaattggagcaagcaaatttgaggaagcattgcgaatgggcactgagacctatcatcacttaaaggtggttttgctttatttcttctttttttatccaatcctattgcttttactttctgtctttaggggctttttttctcctcataatttcactcattgcaatgttcccaaactagaaacatatcaagtttagttgcattgagtttggttacattgtcgtttacctggcttacaatgatttagatcggtagatcctatgttattactactatagtcttcctttgttgttgcttactgttcctacgatggtggtatttggttttaattgatttgacaatccaatctgttgtttcccagcccatatatatgttttttgatcaatgatggattaaaaaatcctaataatcacttgctgatatcgtgtttaagctgatacatttaattattgttgatgacaaaagggcaggctgtcattacagaaaaatatggtgcacataactgtaatgttggtgaagatggtggctttgctcctaatatctccaggcaagctttttattggatttctacagcttttgaaaattctttactgttaaatacaataacaaagcctttttccactttgtggggtcaattacatggaaccactgcaccacaaatttctgtaaaattcttcactgttaaatgaataatataaaaggggtaaaatgtctccattttagaagaaaggaaagaaaaacaaaaaatatctccaaactactggttttactgctgtaatttctcttactgtctgttgtgatttcttggatacattgatatgatatccctgttcctttgaaatctatgataaatatgtgatggaaagaatttcatttgtattttgcctcttaatctaacttgcactttcttttagccaacattttgaactgctgcatgttataattaccatgttttcttctacatggtaaatgcatgttatgaattatgattacatctttttttaaagattaataaaaccagctagtgtcctatgcgcatgaatattttaaaattcaggtgaaatataaaactagaatctaagatgaagttataagcatgatatgaagaattaattccaaagaatatgggttgtaaatgaaaagaagagagagtagattaatagattaagttaactttcaagggaatatattatcaaatttaatataaagggttggttgtattaattttatgtacttgcttttgcttattgttaatgttatttgaagctaattatctaaatttttaagcaactaaagatttaataccaaactactatagtttttaaaatataaaatcacttaatatttatgaaatttgcacttggctaatgttgttacattaagtatttttccactcaaagaaatcttttgttatattaagcattttgattttacttctacctattagctgactgtttaagtatcatcagctttagagaagccctggatcttgtgaaggaggccattagcagaactggttataatgagaaaataaagatagctcttgatgttgctgctacaaatttttgcataggtatttctaagtttctctcgcttgtgtacgtttagattctcaagaagatggaatttggtgattcttgctctactattttgcttatagctattgtaatgagagtctttgttgcagcagtgctatgctaactgttttactgcgtcatttatgaaaaatatgaaccattaattatcctttgctttcatagcaaaataaaactagtctttctaagagatacaaaaatagtactcttatttgataatagtacttcaataatgactataaatacaaatgaccatccttggccatggtaatatgtcatctttatattctatttaggggtgtcatttcagctttgtttctgaatctagggttagatttttaaaagccaataggatgagcatgatgagtgactgttatgaactttaatctgtagagcttgttatcaacttattgtcataatttatcattttaatgttttatttttaatattaataccagataattaatttatatggaaagttgctgcaaaatattataatatttcactgttgattggtttcttctttttctaatgctaagttgctaacagcccctaacgcctttttctgtgatgcaccctgcctcacctcatgctgttaaaacccccttgtactttttgggcaccttttgcctttgaataattttaaccagtttctactgttgtgtatgtgctttttccctgatataggtaaaagatatgatctggacttccaatctcctcaaaagtctggacagaattttaagtcagcagaggatatgatagagttgttcaaggaactatgctctggtaaaccattttatcttagtattttcctgatgggggacattataaattatttagcctatgctttgtctttattttggatttttctttttgaatttgtagaataccctattgtgtcaatagaagatccatttgacagggaagattgggaacatatcaagcatatctcaagtcttgggatttgtcaggtattattttttaatcaattaatattttgtttgagttaatgtgaattcaatctctgtcctggttaacttgtgcagccaaagatggatgctatgaagtataccttatcattttggagattacatgatattttttaatgatagcaatggatatttttaatagaaaataataaccaactgattgttagtgtatcaatgccatattgactcattagcaggctatgtgaacaagggaggaaaaacaatatcatataaaattgttttgtcttttgtcacattattggggttgtgagcgttagaaaggtcatttgcatattaccaccgagatgttaagtttatatattggctactgattggaacttctgtttttacagtttcccttcattttgaatggttctgcaggtagttggggatgatctcttgatgtcaaatgcaaaacgcattgagagagcaataactgagtctgcatgtaatgcccttcttcttaaggtaacttgctgtttcttcaattaactttcaagtgtctgttttgcctaatgacaaaatttaatcttatcatgtttttatttttttatattattgttttttaataataaatagtaaacttagttgttcatggactggaagcaatcttgtttcagatctaagttgaggtgttggatatccacaaatatctttttcatgcaaatacaagatcgtaaattacaaagctagtttatgtaaaagaaaaagaaatctaaacatagcttgcctgtaatttagttttgccactttttatttatttttataaatcatttgggagggtattttaaatatcctcctctgtactttttcttctgttttattgaagaaaatacactgaaaatgtggtgatttaccattgtaatctaggtcaaccaagttggaactgttacggaggtcattgaagtggtgaagctggcaaaggaagcgcattggggggtggtaacgtctcatagatgtggagaaactatagactctttcattgctgatttatctgttggccttgcttctggtgtaattaaagcaggcgctccttgcagaggagagcggctagaaaagtacaaccaggtctctttctgatttttatgctgatggttttactgcatgcattatggtcatgattcttgaatacttcaaaaaaaattatttaccaaacttattttgtcaactcaccaattcctctcccatgggaaggtggtggcagttttctatgataggttgtatatttgtgatatcagtagtgtttaagtgatgattttataacctgtaattttgttcattaaagtttgtaaatatgctaatttgttctgtcttgttttaatagcagtcgtactagtacctgagtctgtagatgttattcctctttaggcttctcaccctatgtggcttgatggcaatatctgtatatgattcttttaataataacatgcatattaaaagcaatagctgtgagtctcatgtagagatgaagttgatatttgtcgtgtatgtattctcgtttataaagtgaaacgaaggaaaagcataacagttaccatctgaattttgatagttacttcggattgaggaggagctcggagatcaagcagtttatgccagtgaagattggaggcaataagaatgatttttttttttttttcatattgttctttgagatatgcttttcttatttaagtttgatacgtgtggttgaagttcatccctgtaccatattcatcaactgctgatgttctattgccattacttcaactttgatcgttttgtgctattgggctctggagaatgtttcaacgagtattcaacgatctgtacaagatagtgcggcctgtttatttgtctatattgttataggggataaaaactagcactaattcaatgctgaagttaaaattgttccgggcaagtgatattgattatagttatccaattctttgcattgcttatgttccagcgcacctccttttacagacctgacatatcattagatagattttatcaattttaccttttttatttatttattctatacttattactttcgtgtgcctttataatttaaattgatatgtgatgagcaatggagaaagggaggctatttggtttcctcgcattaatgttttcattttttttctctcccaatattatctagacattttgtaatattttttcaataaggattaactcggtatttttgttctcttttagcataacagagtgcagaaggccaagagattaataccctgaaatttatggaagtcgataaacttgcaaacgttacgtcccattatcaacttgatctactaagtatcctttgaaataattaccaaactagatcgtggcaacacttttttgtatttggttttcatcacagcaagcgagaatcacaatgctttctttactttttaaattggacttaattgtccgataaagacaaacatcataagtaattaaagtaaaaaaaaaaaaaaaaagatttctccttctaatttcttaacaaaaagacgcaggttaacatttgttttttttcttttattttatacttattactttcttgtgcctttataatttaaattgatatgttatgagcaatagagaaagggaggctatttggtttcctcgcattaatgttttcaatttttttctcccaatattatctatacattttgtaaaaaaaaaaaaaaaaaactccaataataaggattaactcgctactttcgttctcttagcataacacagtgcagaaggccatgagatagtaccctgaaatttatggaagttggtaaacgtgcaaaccttacatcccattatcaacttcatctactaattataccttttttaagtcctttcttcaccgatgaacagcttttgtatcctaaatattaattaccaaactagatgtgccaacactttttcatttttagcattaagttaaatttagtaaatggtaaggactaaaatagattactaagaaaatgtaaggaacaccaaagtaacaaaaaaatttagaattatacataattatatttacagaaacttaaaacatgtttatgttacgaatgttgttgattacacttctctctttcatctcgatctttatggatgtaactagatcaggacatttatgttcatagatgattttgttctagtttctatatgttcatgtgagatcatagagagtaatgattttgttctagttgcgtgttatctacaacctatcttgtggttgttgaagagtaatgacacccattacccaacccatctaacatgcatggcaaagccagattggtaaaatcactgttttcagaatcaaaaccgcacaccaatgtaatctatactatctatactatagtatctatactatagtaataaaagtactcttttttgatgatgtgtcaacttgtggtgcattttcagctttggaccttggttcgccagcttcccgttgcttcgcaggttctcacaagaattttcagcttcggaagctacgtgtcagcgccacatttcgtctctgcttctcccagcttcggcactcagcttctctcagcacaaagcgcaaagcagaacgcgggaaatggtcttttagttcacacgctttctcagtagttggtggtggggttctgccaagcaaaaatgacacaaagaccatctctccttctccagccattcatttctctggttttcgtcatattcaccgttttgcgtttcttttctctgttttttttttcggctgccaccgttttggtctgtgaatcaggagagcgattgatttttcgaagtctattaattgtgtcaaagcaaacaaggtatgtgtttttgctgctttatttcccattgtggctcaaaaaaatgatgaagagtgcttcaaaaaacccagagctattctgttgttaagaaaacatctttttgaagataaaacatcttataaaatccttctcactttttcatgaaagtttatgcattccacctatttgttcaaattcttgtgccaatcattttccaaactaagtttatttaggcttgcagttgggttgttataagagaaccaaatataattttggcttttaatatgtcaaatccagccctcatttctctgttttctcagccttatttcttctcaaaccttgctcagtcttgagaaattatatttcatatttacatttttcattatgcctttgaaacaatttatatttcaagtgttgaattattttatgttgtggaatcgacagattgctcatcaaggttctttctcacaaggtgttagttatacgaattcttaggtaatttctctctcaaaaatgcaatatatctctttcttcctgtgctgagatttctgtttaatctggcatgattgcaatgtagtataagatgcggatgcttctttcacatgaattcctgcttcgtgtcccttttcctccagtttttatttggagcttaatttaattaaaagtttctcaatttcttgcttctaataccattttgattttttatttgaaattttgaagacatattatagcttaaaaggggtccctcttagaattaatgcctgataaccatatctacaccccatttaagtccctgatgaaatattgtatgactgatgggttggtttgtaggctcaatgaccttatctatctcttttctatcttcagtctataagctttttgatttattaggtttattcaatgtgtggcctatcttagaatgccatttcctgggtgggagcactgtctaatttttctgtccttgatgcagtctttaatgcctcaaaattattcaacttctaattccaaatgtaatcaaatgtttcgaaggataagtgagtaaaatattaaattaacagtttcttttcctttttcttttttttaaaaaaaaacaaatatggacctatggagtatgaaattggtgctgctggtaaagcttacactaagtgggcagcaaaaatggctatggaacttggtattttggggtttcatgtgcaagcaagatgacacttctgatcctcttgtaagttcatatgaagtgcatgtatttctatattgtccatagctatttttgccttggtgagagtactgcagaactcaacacggcatgctcataaatgttcttttctttcaagaggctataaaggtgttgtttccacttaatatcaaaaatagattgtaaatttgttggcactgcagaactcaacatgacacttatttaaaccttgaatcgcagggattgataggcgagttcaacacgccaaagaatgaaaatccttactcagttgaatttcaattccagtggctgtatacaaatggattactcgcaatcattttctgttttggactacttgtcattgcccttaaaagcagaagagcaagaacgtggccatatggaacaggttaataatccaaaaaatcttacaagatagagcttgtatgtaacacaatgtttttgtgttaggtttcatttatttacttcacaattcccatttcatccgttgttggatttatgcatacaattactagcatttagccggtcaacgcatagaaaatacaatgctacaaggtgcttggatcactgtctggctgggctctgctttttgacccatgtaccgctatgggacaaataaaaagtaaatcatgtgcctgttgttttctggacatgtagtatattccatattttgtcagtgataaatgataagaatttggaaggttttctattccttttttgaatgtttcttgtaaattcgaatttttagcttgctgtgccttgcctattttttaatcgatgatctggtcctccttgccaatataagtggtgctggtaactcattcagaattatcctttcggatcttcacatgcctgaaatggatggctttgaaatggcaaagagaatcaggaagttccatagccatagttggcccttgattatagctcttataacaagtgcagaataacatgagggagaaatgcctacttgcaagaatgaatggattgatccaaaaacctatcgtacttcatcagatagcagatgaacttagaacagtcgtacaaagagcatgtgaaaaactgagaacagttttaaaagcatgcttcggtttaagaaaatatgatttcattagtaattacaaagaggtcatgttattttagttttgtttcctattttcaagcattgtgggctatgcttttattattttgtgaacaaattcttgaaaataagaaacaaaataaaataaggtgtcttttataattactaatgaaagagtgactcaattttctatagttgctcaaaacggcattgtgaacttgggggatttctaacaatatcaaataataaaaatagccggtttattgatccaaaacaaaacatggaagctactttcatctttccttggctgtcgatgtcatgtatgatgtcttctatttatattttgcagaaataataatttagttttgccaatttaaagctgttgtaacttttggaaattggattgattcataaacttttttatataaagagcaagatataagattttttcatgtaaggaacataacaaagagttataatttaaccttttcattttgagtgtccggggtaatttaacctttcttgacatacatataatatatttaacccagcaaatgcaagtaaatttgtgataaagaaaaaacttttcaatcatagcaaatataagaaatttatacttagttttacataaatggttttccctctttatttttctgttcttttgaaagaggaagagtttattttattaggtatgtgaagtctaaatcattatttgtgttaacaacaaaagaatggtctgtatggaaatatcagtaacacattaagaaaaaagaaaatcaaattaagcatgaatggtggacagactaaaaatgacttattaaacaatactaaaataaagtgattttaatttgcaaaaataatttttgttacaataaaattttaaattatttattcactatatcataacgtaaattaattttaatatcattttttatgatagaaactacaattatcatttacggaaaataattattttctatggcatcatgagtgaaccgttatggaaaaattttctttttaaaataaagtatttaacatagttacatatcaaacaatcaacaatatttattttattaaatatattatttatttttaaattttcactcatataaaataatggataaataacagtaaattaaaatgatgacatttttttaaaataaaaatattttgttttattatttaaatttaatcaatatttgaaaattttaaactctttatttaattcaattatcacgttaatcaacgtaataacatttagttaatatatttattagaaaattatactttgattttttgttataggaccatcaaagttaattaatttaaattactttatcaatgataccataaataaaaatactttttagttatgatagagataaaaaaaaattaatttgtaaacatgatttttggaacaagaaatttttaaattacttagtcgtcatattataatgtaaattagttttaatttaatttctttatgatagaaactataattatcatttacgaaaaataattattctttggatcatcatgagtgaaccattatggaaaaaaattaaaaaatatttaacatagttatatatacaaaaatcaataatatttatttttattaaatatattatttgttagtaaattagattattttataaggtctatgaaggtctgaaccattatttgtgttaacaacaaaagaatggtctttatggaaagaacatgagtaacacattaagaaaacagaaaaccaaataaagcatgaatgtgtgggcagactaaaaatgacttattaaacaacagtaaaataaactggttttaatttgcaaaaatgatttttgttacaataaaattttaaattacttattcactatatcataatgtaaattaatttaaatttcattttttaatgatataaactacaattattatttacgggaaataattatcctatatgccatcttgagtgaaccgttacgggaaaaaagtgtttttaaaaaaagtttttaacgcattcacatataaaaaatcaacactatttatttttattaaatatattattttgttggtgaattttcatcatataaaataatgagtgtatggctgaatgaatataagatggctgaatgaattaagatttctgccagtgcattgaaaagtttcagcttaatattaatgtttgtatttttttcataattgcttactacatatttctgacaacatttattagtaattttaggatgtctctaatgaaatgtattattaccttaaggacacaggtttcacaatagtctgttttgaagaaacaaccgcatgcaagattgtgtttaaccactggagaaagagcgctaaaataggtgttggttgaaaaggttttgcacgagacaacaatttaaaagctgacttcgagtttattatggagtttccatacccaagtagcaacatagtgtattggtggatatgttgatggcaacaaacaacttttaactgtcactttttaaatttacatgttaatagaaactctatgcaaaagttacaagttgtcctagattctagccactgtctcttcaacttatatgctttatattgcactgttatgtcctgcagttgtatggataaatatatatatatatatatatatatatataagttgcttttatatttttctctgtcttttcgattaatgttaacatgtttaatgtgataatgtgcattgtaatgtataactaacccgtgcgtatgtgcacgggtcaaatactagttgcaaaccaagggattgaatagctatcactatcagcaacctcggcgctcctccccttctattgtgtagcatttttcttcattcttaaaatttttgtacgaacactttggaaccgtgaactttatggaagtccatataggtttcaaacattaagtttcattttgaaaaaagtttttcttacaagagaaagattgatacgataaataatgcgatgtaataggatgaaagaaataaaataaaataaaaattattggtcaagtgttaaaaataaaaggttattaaaatatcatcacccttgagctactagttatactttttaaagttatttcttcactacacggtcagtttttataacctttgcaataattaacaaactacactgtgggtttgttatttgttttagatatactttatatttagttcagaattattaataagttgttgatctaaataattttggattcgattttcttaaataaaattaatggatattttacattaatatcaacagtcataaaaaataattatatatttattgacaatttagtatctatattttttaaatgatcaattttgatttacaaatgttgtgataaagtaattcgaatactcaattacagtatcaaattaaaaaaaaaaattgtgattcggacacgggttggacactgctttaggaggaaaaaagaataagactacaattattatttaaaataaaatattaaatattaaatatatgtttgttttaatgtttgagcggtcgttcagacaaaaataataaattgttatttctcacaaattaaaatcacactttgtaatttgtgcgaacggaaagttaataaaatacaaacatgtcctaagaaactagaaatacagatctattgcatgtgccttcttatctatttttcgctttatctctgatgtgagatttggctctcgacttccattgcttcccagtggcttgtgagtttttatttcacacacccctatttccattgctttgtgattttgtgttatttctaatttcgtttggggagttgggcttggtacaaatttctgttgaataatataaatttaatttagtccattaaaatcaagtgttaggtttatttaaatttgtgttactattctaaagaaaattttaaaaaaatgtagagataaataaaaataatatttaataaataattgaaaaaagtgtgtataaataaataatttgaaaaaatgaatagaattctttcttgaagtgtgtgaatttttttcttgatatttttagatttttctcttgaagcatataaaaagcaaggaaattatcatttgtaaactaattcaaaacaaaaacatttctcatataataaaaattaattttctttcatatattgtctccttcatttctctcaaatacttcctataaccttctccttttaacagtttctaacctttcccctcctgcacactgcaatcataatatcatatctataaagtaattgatttctttaacactgttataaatcatcacataagggagaatgaatgaaacagtaggtgaattgcacatattcttctgcgtgtaaattttgactatgattttgaatgtctatgaaaaaaatccttaaaatcccatgaacataaaatgatataaatattcttaaaaaaatattataaaataagggcaatttgataaatgtataaacaaaacgttacttttccacttctctgctcaagtatagaaatttgtttttaaaggtgggtttcacttagatttcttttatcttccactattttgcacaattcaaaagtgacaacaattgtaaaacactaaaacttgaagttgacaatctggtgccctttccatccatccgtccaaattcttacgaaacaaacgtaccattagttagatattatttatgattatgattactctgtttggcggtaagtggaaaagcacttataaactaaaactgaaaagtgctttacatatatactctttttcctaccacaaaggacatgaaagcacaaagtaaagcagtcccaacatcaaagctcgattcctgttaactacacaatatgctacatcaacaccagcaaacacagtcatgttgtgtatttttacaaaatatacatccaataatgtgcaaaataacgtggtcagggaaaggaatgcaactacacaaaacgtaaaagagtaccatattcgttaacccacaaaatatcttcctacaaccgaatttaaaatccataagaacacctaatattaaggtttaatttggttcaagcaaaagcgaagataacccttctcaccaatcgggtaatgaaccacaacaggcagatgcagctggttcgacataaagatagtgactgtattagacaacggcgttgccttggtgaaacagttcaaaaatgtcaatccaaaattcaagctcacagtctgaataatctctatcacagtagcttcctcatcagcctgtatgcattaattgcataaacaaatacacacattctaatctcacagagagtaatataagcccaaattacttattgttacgttaacgctcatgaaagaatttggtgctagtgaacatgttaccttgtggatggaagtattgttcctgcggactataattgaagtcccaatatctcctttgctgctaaaccccacactctcttcgttaaccataatggaaactaaaatacagcaacacatatgaaaaaattaattaattgcaaagtcaattaattaaagaatgaagaagcagcaagaattagaaacatgcatgcaaaataaaatgatgaacgtaaagtaatgcattatgcatgcatgcaaaagagaaaaatatatataggaacgaattaccggtgtccccaaaaatagagaggtcagtgcaaattcttgaaaactcagctgaaggcatcttaacataggcatcgtaaatcagctcctcgggaaaaacgcattcgggcttggtgtctatatccaccagattcatcataaaatgagatatcttggctcgcgctataacacacacaacaacacacgaatctttagaacagccctagcttacgttctatcttttcattcatcaagtaaagggaaatgcataaatcttaaactaacaagagagagaaggaaaacaaacgtactagggctttcgatgatgaagttggcgaagtggatgccatagtcggctttgatggtgatggtgtcatcgtcggcggcggaacgcaggatcttggccatgttgttgaggttgacgccgatggagatggtgcggtcgcagcagtagttcttgaaagcatcggattggaggaagatatccaccacttccatgcgggtgggatctatggcttgcatggagaagccgatctgggagaaattgaagtttgtatcgttcaccttcatctctcttatggcctcaaccatgttctttaggactgaaccttgcatgcgagcttccaccatcttctttcttcctttcttgttaatttctattttcaagcaacaataggacgagtttatttatactttaatttaatgtagtgcaacattctgaggccactccgcgggatttttctgtcacttcaattcccgtcattaccatcaatttttttttacttaattgtatctttgatttcctaaatgtgattttaatcttgtgttccaattgcacaaatatggctttcaattatcttaattgtgcagttttagtccttctaattatatttagttttgtaaaacaaactacatttatttaaatattttacaattttgttaacattgcattggatcatgcatgataacttgcacttttaattttaatgcctcacgactacaatatcataagaaacaaaaaatgtaattaagttggacaataaatcatcaacatgatatcttatatataatatcaagttaacaatatttattgaatagacaatccatttgacaaggatgattggaaacatacaagtgtatatcttaagtcttggaatttgtaatattatttttctaatttttaatcaatgaatattttgtttagttaatgtgaattcaatctctgtccctgttaagttgtgcagccaaattgatgctatgaaatactagcaggacttttcatttttggggattacatgatatttttcaatgataacaatggaaatttttaattaaaaacaatagtaacaaactgatttaaatgtatcaatgcgatattttttttatcttcactctcactttttttttattgaatttcctatattacttgtgtagttatgtcccttcacaccctccattccctctcacccgtttctcttctctcccgttcgcactccctacccccttcccttcaatatttgtcattggtcgtcatttgttatttgataacaaaaaaaatgttaaattagtgtgctataaaatacacgagtcctaaaaatatcaattaagtgtggattgattcgattttaaaaacactaaccaaaaacttattcaaatcaatctattataaatataaatagtaaaaaaaatgaaatagtctgtttcattggcttttgtttcttttggatcgatttttttatttttcttatttgattagatttaaacattcctactagacgtgtcacataggatggtatgtgaacaaacgagacttaaaaaggggacctacttgaatgatgggttacagaggattatctcttgtttcagtaaatttaaggactacagtgaccatgtttatcttattcaagaactaaattgagagtttactcgtaaatttcgaatgattcttaagataattataaaagtaatttttaaaaagctttgaagaaaacaataagcacgggaaaaaatataaactaaacatttgcaaagaatgaaactttcaaagcagtaaagaaattattgaaacttgaaagattatgccaagggctttacccaccctattaaagctcaataacaataaacgtcaattgaaccatcacattagcttggggaaaattcttctgggcctcattatgaccacttaggctcaaataaacaaaggttaaaacaccctttccaaaatgaaaggaggtgttggctaggtgatttttttgggatgcgggaagagatgcccataaacaaataaagcaaacacatttattcaatgctattaaacccaaggaaaacattacataaacactcattatgttatttaacaccgagagaggagaaaaaaatgtgtgtatatatatatatataacaggatttatgatataataaaaagagaaaaataaaaagtctgcaaaaaatatttaaaataatgaaatatttaggtatcgttactctaaactcaattatcttatcacaatccatatattaatgcttttgatggcttcagaacccttcctttcacatgttaagactcatgtaagtgtaaagtacgagatcatgatcacaatctcttaataataaatgctacaaatcaagacattcattttagaaccatcacttatgtctcatcatgcaaaaaacactcttatagattaatattagtacagtccgcatgggtaagttacaaaattaaatatataatataatggtatatatttagttatgattgtgtaaaacttagtaaatgagaaacaaaagtaataagattggaatatgtaatatattttataaaataatgatgtatatttagttcataagttcacaaaatcaaagtactatcatttttgcaaaatttcactaaaaaaagttttaaacaaagtttagagagattgatagagtatgaagcacttaaattacaattaatcaatccacaatagagctagcaaagttagatttggatatgggaactcaaatataattttgtggacaaccttcaaattatgttaatttgcaaaagccttccatccttgatcaatctttgcactctttcttcatttgtacaatatcaaataagattcatctcctctaacgtgagaagttcacattaaatgataaccattaattaaaaatcaatggagttaagaatttcataatttaattattatgcaggagcatatatttatcacaatctcactttaaatgagttattttcaacaaatctatcaagctttttgcataaatgataatacgaccacaataataaatgatacaaatacttaacatcttattacccacctaagcacgttacacctttatttcatttttattttcatcttctggatcaactatcaatctagaatcacaatctaatgggaaaacctcacaaataacatacttaaaatactaaggaaaatagataattaaaacaaaaaaaaaattacatatacacaaaacacaaaacacatccactactatagcttaataagaatcctatatagtttcatttgtttaggacaagtaactaaatatattaattaccattcggtaacacgtttatatgaccattgcagcaaacctcttcagtaacttcgcttttcatcttggtctcgaccgaatcaagtggatctactgtttcaaaattatatatccattatagaagcagaatggccccatcccatctttagatgaacaatcgatgaaaacaataatgaaatttcccataaaattacatctttggttacttttgataattcatgtcacttttttcctagaaaatcacaacaacaacaaaaacaagggtatcattaactgttttgtgagtttgatcttctgtgataacattgaattgcgaaaagaatagtaattttaaaacatctattaattaacttttcaatttcacagtttgactaaaagattctgtttgtcgtgaatcttaaaatgcccaatatttagtagtagctttctattcatccaacgtttgttgtggggcacattgtcaacaaaactcgtaatgattgtttgttatagctgaaacactgggtggccgttgtttgattgcgatgggatatgttggcccatgtgagagaggaaatccttaaactaaaattgtataggccaaatattttaatttatgagattttaaaaattcttcattgtttatttataaatttagtaaaaaaaatcatttatttaaattatttttcatcattattttgactgtcattttgagctaacaacaaatatatatatatatatatatatatatatatatatatatatatcaagctacaatgtgatttttataattcttcaccggttcttaattttgtgaggaaaaaaaacatttatttcaattaattttacaatcattttgcataaatttaatgagtactgaaatgaatgatatatatttgacaaattgtaaaactaactaacaaaaagattttaacatatcaaaaactaaaatgtccggctaactaatatataatgaactaataatttatttaacttttatattcggggaaaagtattagctccagtgtcagataacatattcgagaatgaacctcatcgtaataatcacttcaataaggttatacttccttcgttggttatgaaatctaagactttttttataaaaaaaattataagatctttttctagtttttaaatgtagtaattatttttttatatatctttgcttccttattttttttcaaacattaataaaaaataattaaatagataaaaataagaaaaataattttaaaataatactacaaataattgataaactatttatttctaagaaatatgaattaattaaaaaacgatatagtactagtatatatcacaactttgcatgtaagtcctgctaattaagcaaacattaatttgaagactttcaaacacagcaattaaagtctctatataacctcagtttctagccatcaaataaactctagcctttacaacagagccatttccaagcttaaaaccaggactaactgagaaaccaacaatgtttccaggaggcaccctcccaccagcaaatttcagcacactctccatgtaacgcgggtggaactcagctccaccacttgcctcaaacttacttggcgcaggatcaaacgagaacgcaaccagatgaagcaaccacactccctttgccacccccaaaaactctttgtaaaaccgagtccttggatggttcccttcagagactagactgtgctgctccaaatcaccaaacagtgactcctccatcttggggtgcacaatggaaaggtacttgttggagcagaatttcccaaaattacacgttggtaaaactcctccaaggagctcataagggtccatggacttcatgtggcagtattggctgaagcaatcgtggcgaaactgagcagggttgaggagggaggagagggtgctattatccatgtagaaactttcgtgatcgaatccttggaacattttcttgtagatgtatgattcaagggcgtacttggcatgaagagttgagaccgtggtggaggtggcggttactgaacaaatattattattattattatagtatttgtcggtggtggtggcagaagctgcttccatggaacgaactgcggcagccatgtcccattgtgcgtcgtgcatgagcgacaagagtagagatgtgaaggactttgatgcttcctttacttgcgccattgttgcttccaagagttctggggatggtgctgctacaaaccctgccgctatttcatgacaccaatgtcaaaaggttgcaattggtataattaagatgctcttcttcttttttttctagacgttgaacaagaaagttaacatatataccaattgaattttctggctaaccaaacacattttttttctaatatatatatacacataagaaaaatgttttttttacaataaattgtataacaaattttacaattaagaaaaaaaaaagagaaaaatataaaatataataaataaataaataagtgttattgtataaattataagaataatataaatcacttaagaaactctactaattaaaatgagtagattgctcttcattaattattgaaagtacaccataaaaaaatattacacgattttccctccctctctctctctctctctgtatattagtgtgtatatatatatatatatatatatatatatatatatatatatatatatatgtcaatcttcatttgatacacaactgacttgtattaaattttttattataaacatataaaaaaaactcgactatatatatgtgtcttgtatgaattgacccatctaatcattttccgcctagctatgtcaatttttaagtggatcggaagtaactgagtttttaatttgaaaagtgaactatgacgtattaatttgttttaccttgaatatgagtattgcaagcaagctttgtcttagtgtaaggctgaggcctccgagctttgtctttaagtttctgaagttgcaaatccttggccttcacttccttcttcagctctttcatgagtgtctcgtagggtgcatgccctcctcctctccttctactcttgccttcttcaacacttctcacactcccatggaacctgtccctcaacagaccaagcttcttcagctgtgccaccactgccacgtcagcctccctcaagctctgcgggtcccacgggcagtgtgcttcctgcaagctcacgtacgcactcttcattgccgataccgcttcgaacacctcctccattaacgccctcatcttcttcaacttcttttcctctcttgaaaccttcaaatccatcaccattttttcttcaccgaagtaaccttcttcgctggcatcttcgtcttcgtgtctgtttcctaatgagccgctgtggtactcctcttccctgtcgccggcgtcagacctgtcattggtgaatgggtggaggaagcaggaggtggtgaccctttggattagatcggagaaattcgacacctttctggtcattgcttattgctacgtaagcgtttgtgcgaaagagaaaagaggaaacataagaataagaaaaaagatggtggcagctgaggtggaccacagagtggggtcagtgagttaataatgctaaactaatcaaacaatggatgctccaatctaacaattaagaacctgtcttttcacatgtgatttggtgcttataaatacggactttgtttgcacttatttgttatttttagaaattaagatatttataaatacggactttttaaattttcatatatgtacttatattctgctaagaattaagcatctcatacatagtaaaatatttgtttatttctaatttcgataactttgtatttttttaaaatttcgatatgtataatattttaatttatttttttataattcttgaaatacttacatatatcaaaatataaaaatatataaacttacaaagaataaaaataaataaaatattagttatcttcttattattacccaatgtttttttaagacatttcattttttttaaacatttttcgctaatgttttcttcttattacccatccatgtgaaaaaaagtagtagttatctttcaatgcctactatttttttgggaagtgcatttgaatgatttgaccatgtcatgttgttgctttccacgtgcgttcaaacaatttgcgcctcttgaacacttgattgaatcactaacctaattttaatggatcctaactttgttctaacaattctaagtttgctattaaccgtaagctatcaatcgtcaacggctaaccgtcaaaaatcaacgataacccgtcatcaatcgtcagttattaagtatcaagtataagttctcaactattggatattagatattggtcattaactaaagtggttgcctcaactcctattttgataagttaatccaagcctaaaaggaaatctgaggtggagcctttttaaaattaatataagtaaaaaaaatcaattagggacctcactaatgcataaagaaaaatacatcttagttactgctacactaaattaactaataataacaattgtataaaaaaaatgttaacaacactctctttaatagtttttatctctaacattttctctatttttaactgaaaaatattagaaattataatttttagtaaatctcactgtttatttaatgaagttcaatcttaatattttaatggattaatcttttacttttagactaaggatattcctgagttaaaaaaaaaatattttttataaaataaaatgaaatatacatgggccttgtcattgcccatcttttcccatacgtaacacttttccctttgaaatgcaatagtaatattggactatttgagttaggtacttaagcattacaaattgaacactgattcaagagaatactttcacgaaacttttttgacataaaaactttcaccaaacttaatttacacagtttagtaagaaaatatgtcccgcattcttctaattttttaagaaaactaataatgatatcttttgtgaaactactcctttaggtcagaaaattgatataaagttagactcaagcttagcatcacagattcactagaagtcattgttttcaccccttgttagctatgcctccattctgcttccaaaagttcgataataacgattttcgtatcatacaattgatgaccaacccttaacttgaaaacttcatgaaatcgtccatctagaggcgctacagaggtgaattgaacatggaattgtattgaaagaaaggatttaatcaatgcacagatggcattcacgagcaagataccttataaagaaatttggcacccatttttaataattaccaccctactatgattggtggcctttaaagaaagcaaagcaaattgaattgccaatccaaagttccaaacccataacacccgaaataccaaaaagaaaaaataaatgagaaatttcactagtcccctcaagtccgtgcttgagctcgtgtatgtgagagaagtccattcctttcattgaagccgtgatacctatgtggcatacaattgctcccgtggaaaatgagaacgcaacctagtcactgcatgtttcactctacatacgaaacttttttaagaaaaagtacaagaaaactaaggataattataatacaacaaactcatccactcatccagcatcagttaaatagatgccctgaactttgaggcgtttgttttatgtcattttcttctattaatttctagcaatacgaaattcattttaattaaaagattatgaaaagagattttgaagtatcttttatttgtagcaaagtcggtccagcatttttatcattgtcttataacgaggaaaaataaaataaaacagtatataattaccgagccttttcaagtgcaagcaaccccattttaattggttttacttagtaaactgtagctacccacgtatatttatttattggcatattctagtagtgttaaattggtttaacccaaccaatgaatgtagctgaattgacaaacacaaattgaatttgttaaagaagatctagatttaatttttgaaaaatacaattttaaggaagaggaaaaaactttaaatataaggaagtttaaaactgaaaattaatattataataaccagttcgaagctcatgagaatctcgagatccaatcaaataatcaagtaccctaattaagttaagttggttggaaaagaaatggattaagccaagaaagaagaaaatcttaaaaattgagaatgatatatacctagaatattactcctagaactagatttagaatagaccaagacaaatgcatggggatgagaggtgaggcaagcaagattctgaacggtgctcattgaagcatgaaattacccaccctgccagcctgtccctttcatctccttcgaataaaagaacggttcaaattgtgaaatcccttcccctcggtcttaccccctataattcgttccttccacttgcattgcatttgcaattttccatctctatcctacgaaaatgtcctttgtcgttttttacttttttccccccccaacgacagattttttttataaataacttaaaaaaaatcatcaaccaaggtatgtaatagtatctacactatacggctcataataatagctaacaccatttgcatattaacagagtcacacaccaattctgaaccacacactcacttatttgtttctttcaactgagacactcacaagtaacaagtcacaacacacacacacacacacacacacagtaatggcatctatggcggctataggttctctgaatgttccacgttctgcttcttccccttcatcgtatgtgggaagaaaaagcgttccacgccgcctttcattctctgcatcacaattttgtggagacaagattcccacagattcagtttcattggcaccaaaaagaggtcgcaatccagtgattgttactcctaaagcagtttctgattcccaaaactcacaaacgtgccttgatccggatgccagcagagtacgtttacctcctttcttcatttttttgtctctgtctttgttccattgttacaacattaaattactgagaaatttcaaatccccaatcatatgtttattagggtgtatttgtggatcaaattgtaaacagggttttttttagatcacaatagtttgaatttcgatcgtgtgatatttgaattggatgtggattggttctggttctgattctgattgcaatttaaaatgtttatagagtgtgcttggcattatacttggaggtggtgctgggactcggctttatccactcaccaagaagagggcaaagccagctgttcctcttggagctaactataggctaattgatattcctgttagcaactgcttgaatagcaatgtcaacaagatctatgttctcactcaattcaattctgcgtcgttaaaccgacacctttctcgtgcttatgcaagcaacatgggtggctacaaaaatgagggatttgttgaggttcttgctgctcagcagagtcctgagaatcctaattggttccaggtaatgacagcactgccttgactctaaattttggtaccttgcgatgatgacttttgctgtcccttgatttgatgttttaacaaacttggtgtgatcattgcagggtactgcagatgctgtgaggcagtatttgtggctttttgaagagcacaatgttttggaattcttggttctggctggtgaccatttgtatcggatggattacgagaaatttatccaagcgcatagggaaactgatgctgatatcactgtggctgcattgccaatggatgaagcgcgtgccactgcatttggtctgatgaagattgatgaagaggggcgtataattgaatttgctgaaaagccaaaaggagaacagttgaaagccatgaaggtaagcccgtataagatgtattatatgttgttatttatctggaaattattacctgaacaattgcttaaaaatgccagtcatttttctttactaggttgatactacagttttgggtcttgatgacgagagagcaaaggaaatgccttatattgctagcatgggtatatatgttgttagcaaaaatgtgatgttagacctgctccgtgagaagtttcctggtgcaaatgactttgggagtgaagtgattcctggtgctacttctattggaatgagagtatgtgttccttccggttatttaatattacaaaaactttcctgttattttcttgcatggtaaatttagcatgcaattttttgagaatattgtacggcatgtttgtgtacattcacaggtgcaagcttacttgtatgatggctactgggaagacattggtacaatcgaggctttctataatgcaaatctgggaatcaccaaaaagcctgtgcctgacttcaggtaaattatataggctatttgatatatctatcatattgacaaatgtatttcaatgatagtgttttgtggttctgatgtttatgtgttcatgcgttttggtatattggttacagtttctatgaccgttcatctccaatctacacccaaccacgatatttgcctccctctaagatgcttgatgctgatgtcactgatagtgttattggtgaaggatgtgtgattaaggtaagcatttcagaaccttcacattctactgatctgctctatacatgagatttatacaattcttaacaaagatgtcaaatataatgagaataatttatttataggaaactaaccttgtattccatactttgttccatagaactgcaaaattcaccattctgtggttgggctgcgatcttgcatatcagaaggtgcaattattgaagacacgttattaatgggggcagattattacgaggtaataatgtggctaaataacttgtgctcagttacacctagtttttccaagttttaatagccaacaaagtttcacatgtcaaagtggttgaaacacttagatattcaatttatcgattgtgagtttacaattgcatgtgaataagattaatacgattggctttagtttgactagaagttctaactgcaacattggttttctgattgttgtgttccagacggaggctgataagaggtttctggctgctaaaggcagtgttccaattggtataggcaggaactctcatatcaaaagggcaattatcgacaagaatgctcgaattggggaaaatgtcaaggttataacatcttctattatatacaattttgttccttgttttacattctaagccaatttttcccaagacaacaggtgaggcgtagtagcttaggtgattttggtattgttttgtgaatcaaaattggagtttcacctcaataacctacacagttaaggttgatggttattgaagtcaaattttaattcagtatcaaaaccacttaagaaactatctcttttataagttaacattcattgacaagttgttggttatgtcaataattgataatttaagtaatgattgcatatttaattataaaatttgtgtgattttctttctatttaattaaagatcatgtaagatttgtaattaaatatgcaatctaaatcattaaatttatctgatgattgtggttaaatattctcatttctcacaatgatacaataattaagactttttttaagtggtcatgtgacactaacttttaattttgaccatttatatttagttgtatggttgaaatttatagatctgatttctcagtaaaaaatagttttcatttgatatgtctcctatatgtttgtgtggacatatcaattgagaaaataataaatattgacccttagattttatcatgaatgatcaagattaaaatatataagtcatgcgttttatttaaaaaataaaataaaatcatgtaatattttaagtaataatctatcttcaaaaaacttttaatctcgatcatgagaatgatcactcatatacaattgtatgacttggatttcctcttcattgggataaaaatggctttctcactaaatatatcaatttttttttttcatactgtgttgccatactttgttttcattcatgtgacatgttacgggatattttaaatctaatctatggtttgtttccaattctcagattattaacagtgacaaggtccaagaagctgcaagggaaacagatgggtatttcataaaaagtgggattgtcacagtaatcaaggatgctttaattcctagtggaacagtcatctaaacaccacaccaccaccccaaaaaatttcttgtaccccaaatcctaatggtgactgcgaagctcattaccaccgcaggagagtttatcgagctttgcttccacgtctaagataggcttttgtgtttcatgatatatatttttgggcagtggcttgtaaataatagcggaagagaaggcccgctatgagcaatcacgctgtaaagttcgttaatcaattcaataaaagtttctttatttcgtactaacaatactatactcgcatgctcgtttatagtattatattgcaacttgcaagggtgaccaagtttggttggaaaatttcagctaaaatggttggcagaaacaaaaatgcaaatattgactagagcgactaaaagactatattccgctgttatttgggacgtcctcataatcaaggatggaacttaccttagagcaaggtagcctccatcaaggttttatgatctaaaatgattgaaatattactataatactatttataagtaaacataatatgaattgccatgttaaaagtagaatttaaattatattgtgagaaggaatttaaggaagcgttacaaagatattaaaaaaatttctatcaaggaaacagcatttctgtacggcccaattcggtgatccaatatccccttccaacaatcattcgccattgggtgttactattgacccaacaaaattgttcttggcccctttcagacaagcacaattatcaaactaccctttttctacaccaccttacattcatgttgccaagtattttgttttcattttcatggtcaaacgaaatcatgattctgttgtgaaattttgtatagcagaatcacaattttgttatttttggtattgttgatgcacaacaaaatcttgattttattatgcgaaatttcgcattgtacatttttttctctgaatgtacatttctctttttcaggaaaaaaatcaaaaataaattatgatttcattggacaatgaaatcacgctttcgtagaactgtcatattttaacccctccttgcacaatgaaatcacgattttattgtatattttttctctctctgaaaagcattacattatcatgtttccactgcacaaaagggtgtgtgaattttttgcacattggaatcacgaaaccgttatgcctttatgcaatagaataatgattttattgtgcaaaaaattcgcaccccttttgtgcaacagaaacacaatgctttttagggagggataatattggatttttatgggattgtaagggagggcaataagggaggggaggaatagcgaagatatgaggaaaaaatagtggtaaatatttatacatagatatttttattaaatcctttatataaaatagttaacttcattcaagttaaaactttaaaataaaagatattattataaatttataactcgacacaaggtaatttaaaaaaattaaagctataaaaatgattagaaattaataaaatgcagaatggttaagaaatgaacaatatattgatcttaaaaagaaaaaaaaatgtaaataataattttggtctctggatatatatatattgatgataatttaatcattaaaagaataaaaaattcaatataatctttaaatgtgtaaaaggtgtgacacttacatttttagtataacttaatgataaattaatcattaaattttacaattcaataataaatttattcttgagaaacacaacttattattaaacttagttttttatatcattaacattgaatatttattaaaagataataaacacttagatattaataaattatatttatttactgatatgaaaattgcaagtattaaaatgtagaagcaactgaagactctgtgacggaccatttttgttagcgaccgaaatactaagtattagtaaatcagaaatcagtttctatagcgacttgggttttagaataccgcaatgttcggtctctgaatgccaagaaaattagcgaccgattcgctacctatatagcgattgatttttggatcgctaacgaaggttttttgtgtgtatatatgttaaatgcttgaatgtttaatttattatctcatctgagacttataataaaaatatattttttaatatatatatatatgtctaatattataaaatttacttattgtctattgtgaaacctttgaaggattaataaatttaatagttatttcctttatttattctatatatcatataataattttttatttattaattgtgtatctaaacatgcaatattgtaagttttttttatacggtgaggttgtttaaacttattattaaaataaatgtttattttaatataataagttattttctgtttttattgtatttgtctaaattatttttactttaaaaatagtttttttttttattttacaaaacaaattttatgtattttatgtatttattttaaagttttaacaaaggtgtcttacataattttaaaatttttgacccgtaagaattgataatgtctaggatttacaataattcatgtatcctagtaattcatctcatgctactcaatcatcatctcaacaatagtcagtataagtataatttttaatttatgattaaaaatgttatataatgttaaaaaattataggtacgtttaattaaaatcatgaatacgtacttttttaggttcagtgaccgctctaaacctttgacccatttgacttcgccttctctctgtgtatggactgcaataagatatctgtgttggtctgttgtctgttctgattttgaatgttcattgtgtatgtaaaaattgtacttggtgtacctcactctgtaacataaattgaattgaatagtataaacaatttatgtaactgtcattttttctctcttgtcattcgaacgaggagtacgataaatttggctccgaattattactttattgttaaatacaaagtttatatagtaactttttagaacccaaacagtactatctttatttgttttgttagttgaaactaaaaaactaatcagcaataactaaaacaatattatgtttttctttttttattcttttacaattttacaatgggataccttttttaaaaactaaatacgtgtttggttccactttccagatccatgttcggagcaaaatcacattaaaagtgatgcaaaagtaactattaattatgttagggattaacgttttgcaatttttaatgtgttttcaaaaacaccataagtccaaaatttaatgtgaaattataatttaaataaattaatatattttagtagcttagaattaattttatcaaaattaatcttacttaattttataacaaacagtcccaaattgacgaatacatcgtgacaaaataaacagtgtgttcttaacatatataccatgtagaagttgtagtacgtactccgatatcataagtattaaaatcttagctgtgctacacggatccaaccaaaaaaaaaaatatatatacttccactaaattgacaaatacattgatgacaaaataagagtgctgtttacgtaacatggagaaagtcatagtacgccaatattcttgttttagctatgctactatcactatatgacaaaaacttatcattgtgggtagaaaatatgaaaatgactctgaacatatgaaagcatttgacaattttatattaatacacaaaggaaaaagtaaatcttattatttcgtatttacaaataatactttaattgtcattttagtagggaagaataaagaaaaagaaagagaaaactttaataagcctcatactttcaccacgttactttaaattgctaattagacaattttaaactaattgattcatacattttatgattaacagtaagataaatattaatcagtattaagttaaagaattattttattttgattaaaatacataaaattatattattgataaaattttgtgttcgcttgtaatttctataacaaatactctgtgattttaattctttaactatattttgaagacactgctggttagtaaaagtgttttaagaatttttcattatttgtttatgaaaaaaaaatagtagtagtatgaatgagagagacagaagctgacagtgctactactgctctctggtgcctagtctctcctcctgcttttgactgtcacattctgccatagcttcccagccagccctgctgtgctgtgccgtgccttctgcttggcttggctggctccatcttcgatgttcttgttctgtttccgcatgtgattaagaatttaagacctcaccagaatctaatctaatcttgccgtgtcttctgctcttttttcttcatccctctgatctcatcaccattctttctttcttccgtattgcctctcctctcagttctcaccttgcattgcatctttttagacactccccaccactcacaagtcacaacactacaccaccaaccaaccgtcttaagatttttcactactatacaacaactgggaatctgggatattgtatttaatatgtagtaataaattttgataccaatatcacattcaccttaataaaattggattcagatcacttatatcaaatatgatgtaaatcaataattcgctagtcagaggggttttggagtcatattaaattcatttttttcttaaataaaatcttgaatttaaattttatgaataacaaacatgattaaaaaaaattactgatagtaatcaatcacttcttcaatagaaattaatcattactaaaacttgtagatattctacattaatatcatagtaaaaataatcaaatatgatgtatggaaccttatataaaatatgatgagattaagattcatttaaaatctcattttcaataaaaggtataattattctattagaaaaaaaaaagaacattttgataaacaattaatatcctacttgtggctgttgtaggtgctcgtgtttcagttttcaaatttaaatttgaaaataaaatctatttgggtaaaaaaagagtgaaaatgaatttttaaaaaatcttattttaaccttttaatattatcgcatcttcttcgatactttcgttcacacctcttcacctcctgcaagtattcaatttaacataaaggtgacaaaatagactcaaacaattgactcggccttaatccacatgttgaaaaatataagattcaactctagattttgattatgaattaaatttaactttttttttattaggtttaggtcacaatagtctgaataacataagtttctagtgtgttttgatctcattttagaaatctaatttaaattttgactttttaactcaacttgttataaattatgatccagatcaagtatgtaaacgacttaactcgaagcacactcaatgaattgtagccttgaactttaatcttgagcacaaaataaatttaatttttttagcctaatatgatcatggaaccatttgggcttaacctaaaaaaaacttatgcaaattggtatttcacaaaactttgacattattttgcaaacgttgaatcagggtagactttttggtttgactccatgtagtcacatttacatttcacctaagtcatatctaacttgatctcgattaatgtaatagattgatctttaatggtgtgttgggttgggggaaaaaatgaaaaagaataaatcagaagaataaataagagaaatagataaaaataaatactcttattattattattatttggttttataaagagaacaaaaaatattaataaaataatttgtggtgacaagagtgacaaattatcctctttttttgttttgtctacatgtggtcgtagaaaaagagcaacgcacagaacgagacaattttttgtatatttcttatcacaatagcgaagagatgtttttggatgagacccacaacaattataaaaatttcttcactattttgggtctcgttttttaaaaatttgaattgaatataagttttattttatctgatccagtatagcccacaacttacatcaaaatatgaattttgataaaaatttgaagagatgttttatttgaatttatagttggattaaaactgagcacactatatttttagatgaaaattgaatttgatctttataattaaaaaaaaatgtgaataacatggttaaaaaatatagatagatagatatattattattatggatagttgtttcccgcatggaagtcctgtgtggctatgaaagctgctcacgagatgcatttcagtggtcaagactcgagtgacatattttgattattttcaaatgaaagaacgatttgatgggtacgtaaaaagaaaaatacttttcacacatgactgcacttgcctctatcaatatcgtactttattcaacagaataaactttagatacagaaaaaactcgtcgcatatgagagtaaaataaaagggcaattatatttatatttcttttaacctgtttcaaaaaataaaataacttcaacaaaaaaaaattgtcagagggaggcaaaggtttaaatctttattcatctctttaaaaagaaataaatgtaattttttaagtatttccaaaattgaatttctttcctagaatacattttcttaaaatttgtatttgtaataacaaacaaatatattaattaaattttaaataaattacatttaatttaattttaaaataattacttattttaaaaactttttaaaaaaaatgaatctaggtaaatattccttttacaaaaattccctaaacgtttttttgttgtaacaagagacagaaaagaaaatgggaaaaccaagaagacaaaagtggaaaccctaaacatgcataaacttcctaaattatgcttaaaatatataattatttttttaatttaatcagttaaaaatataatctatttcaaattaatttcaaattatacatattcactaaaaaaatccgtaaaattaagtaagggtcagatattaagtaaatataagatggtatgtataagtatgtgtaggtagtgttgttctgtataatggttgaaaacaatatatttaaaagtaaaagaattatatccaaactcgtacatcaattagagtaagattgtttatgtttaaccaacaatcttaatttttattacatgtttgcttatgtttggagcaatgagattcatgtccaaaaggaaacaagaaaaagaaactttcacttaagtacgccttcaacatggagagacagcatgaacttgtgttagaaaatgagtttcaagtacatactaagagcatgtttggttcttcagggggcaacctcaaacatgcttttagagcacaaaactcagtttgaacacatgattggaaacccctaaaaacaattttttcacttgagtttgactccaatctacgttcatctcaaaagcaagtgatgccatgcttttgcttcttcaatttccgttggggctctttatgaaatttaacttccaattttaaccctctcttctaataagcatcaatataaagctgttacacgaaaaatatccaaccatcaacacaaaattactaaatgcaccccttatttcattacgttttgatagttcttctactgaaaagcactatatttttaataaaaaaaactctcaaaaacacttaaaagtcatactaagtttttgacatacaactatgttacatgtttataagaagagtttattgcatataataatgttatatgatttgaacacaattatctttcagcataaaaatatatttagtataaaaaataaaataaatagttatgaaacattggaaagttttgaagtgaggatttcatgtaaattcattttgttttaaaatatggactcataatataaattgtatttaaacttaaaagactaaaaagaaaagaaacaaaatatacttttatgagttgtgacacgagaaaataatgaacgtgaagggggggcaagagctgcgctgtttggaggtatttaggatgagatatttacggctgacccttcacccaagatagtagagagaatggaatttcaatttcccattttaattttgttttttctctagttgatgtggtattggtttgggtttcttcaagatttatgcaaataaaatttgtttaaacttttaaaaaataacttaaaaataaatctttttttataaatacttttttaagaagtaaatcttaaaataaacaaaaaattacctttttaagcagaaataatttaaacaaatatattaaaaaaaattattttgttaaaataaatatttattttaacaaataagtttaaacaaactggtgataaaattgttgagggatgactttctaatatacttccttggtcactatctttattttccgttgtgtaactttgtgttttatgggttttattcaattgaatacgtagaactagaatacaaaattagaaaatcaattggatatacctattcttgttttcttttgaatttatatagtacttaaaaattctaatttttaaatatgaggtttattgatgaatgatattggaaaaattaggtgttcaccaccattcttttgagatgaaattttcgaatggaatattttcgcacgcaggtcaagcttggatggagtatctataagaactttgaggccaggatacaaaaagattataaagaatagagggagtactccaaactcttgaggtaaaatgatccgtgaaatagtaattttttccttaaacaaattgtaattttttccataaagttgcagcagtgacaaatggaaccttagtgttggaactagaaattctttttctccttcaatagaaatttcagggggacaaatagcagaggataaagatgttattctattcaaaagcttcaaagaataaaaggtaaaggtgataggattagaatcttgacttcacgaagattttctaatgatgtaaaagtgaagagactaggtccaataacggacttgaataagtaaaaaggtccaagacttttttctttctaaaggttataatttatatatatgtacacattctattgaaacctcattctgatcaatataagtaaataaggtacagaaaaaattaggagcattacagtaaatcaggaaaccccagttcaatctgtccgagcacttgcactcaagaaaactcaaaacaaatggagaaagataaagggcattggcccctagagttgcaaagttatggatcttgtcgctgttatgcatgtgcttcgaacatcaaaacctgaaacccgaaaaaatttccaataaaacaaattgaaactatcattggaagatataaattttttcccccaaatagattctatactctagatagtcgattgtgaacggataataattattgtaaatcatatgtactggtcataatagtggcacaaaaatgagggacagtaaattcacgctcacttttgtcttagtgcttattggtctgaccatccaagattttctctgttggaaacaattaaaaggaaaaaggccacgttcactagtgttgtgctttccttcttgaatgatcgcagtgcaaaagttaattggaattttcgtaatgaaagacggtcaagtgtggaaagcaaactatagttagatattgcactctattaccatatgaattgtatgagaattgatcgttattaaacatttcacttaaaattttacatatgatgctaataatttaagattgtaagaattggtattaagatcctacattggagataatgtaagaaattaacttctctcaataaatgtatttgataaacaaacgtaagattaaattcctaatcacatatttgttggtttttattttaaaattataaaatatttgtaaccaacctgatagtggtcaacaataatttaggaaactaaccactacccacatctcctatttttttgcaacgttaacgtcccttcttttaacataccgtaactgaatctttgatggcaaggggtctataaataagtgtgtctacagccttcttgggtccctgaacttattttatatacatcagcatatacaccatctagtgctttagaataagagtttagaagactaaagagagatcttcagtgcaatccaaagactcagtgagcaatggcggaaggtatttatgatcttaatttttccacacttaatctaattgcttatgttgtttatgcatgattagattatttagtttttcttacaatatttaataaataaggttatatgttaattatattataataactagtttgttttttacaagaaaaaaataagaaaaggccgaaccaaaaaaactaactacaattagtataaaatttagagtttaaggtttatggtttaataataagagttaagtactgaatttataattaatttaatttaggtttaattatttatttgatcctctaatttatgtttaaaatttaatttaattttcttattattaaaaaaaataattagatttttttatttttaaaaatttattagctcatgatcgtgaagatcagctcaagttagtcgcattgaatcttcccaccgaaagtgggggaataagtgtcgaatctcacctccccttggtacaactaaattccgacccagtgttccatatatgaaaaaaatatattttataaaaaagtgaataattttttgaaagagaaatgattatcgtttgctactatcagtattttttaacactctctctatagctcattggtcttctctttcctaaacaaatgaacgcaaaagctaaataggcttgtaagttaaggttttattattattaattaatatatgaaggaaggtgtttcttttaaattctgcctcaaacaccgccgacaattttgtaatacaaacatgcgctttatcaattgaactgaatttacttgtatattttaaaatagtgataaaattctataattgtattttatttgcataaatacttaaaagataaaaaataaattaaataagtttattctataagttaaaaatagtttatataaaaagtttatctcaagataaaatgaaaaaaaattcatttaacttttcaaaaagttgatttattgtaagctaattttaacctaaaagagaaacttgtcttctaaaaaataattttttatacataaattaatttaaacttacaagaaaaatactttatttcattttttatttattttttgttacagatatgggtgacaaaatagatttgactattagatagtccattgaacctactttctttgatgggttgagaaaaaggtatcaacccatcaatctgttttggcttgcaaatgtgtttagaaattagtattatgtcttaggacatcattttattttatattctctagtttttataaaaaaaaatagatttttgcgagtcaatcagctaagccacccttaagccgagcaagctgtatttttcaaaccgtatattaaaaataaaccaatccattctagcccatttttggcagattaatgaccaagcaaactaaaatgggccgagttgtcattttatcatccttacttataaatatttattgtttgtaaaaaaattgattggagattaaaaaaaaatgacaagttcttagttttaataaaggctatacgattaacaaaaactaagtatggttgtttttttagaggagtatgattgtgttgctaagtgtgaacaagaaaagaaaagaaaacaaataatagtagaacagttccattccattattattatttatacatatatacatggctaaaaccactttcatgcaagtgggatctttcacatgataatttaatcataaagaatttaaaaataagttaatctagacacatgccaacttttgtttgaaaaacaataataaattccaccaatcgaaaagtgagcttaaaaacaataaactaatttgacgaatcggaaatgcacttgaagacaaagtagaagatcaagaaaaagaaataaatgtagagaagagggagagtttgaggaggaggaccaccaccaccactttgcatttgaaaaacacctgaagaccatggcaccagttgagttgctatagctggattgaaaaaccaacccacagccgtcctcgcagtgcggaaacatctccagaaaccacaaatatcataaatgtaaaaagcatagtatagtattaataatatattattactattattatattgttattaataacgatatgattattttattgaagagtggaacaaatttgagggagaaaggtgtatggtgtatgcagaggtttggttttaaagtggtagctaggtatagagatttagagatacacaagacatggacatagtatgatagtataaggaagaattcccagacacctcctccttttgggtccctcactttgtgtccttatctccaacctttttgtccttgttccctttccggtctggtctggtcctccttccccacttttatagcctccacacttcactcacacactcatgtcttctacttcttcttcttcttcttcttcatcatcatcaacttcttcttcaaccccatatgacgctgttgcccctgatatccctggccctagtacgaggagaaccacccgtagtggtcaatttgaagcttcttcctcctcctctcagcgtcaacgtgctatgaatgaggtcttgcctgagccttttcttgaagctttggccacccaacttgcccttgatgctgccaactacaatggtcgtctttctgctgcttctgcccttgccattttatttcaggtaggtacttttctttcttcttctttgaaatacaagtattattgaagtctcacaagtgggaatgtaaaggttgaagaccaccttaatatatatcccccttaattaatttctttagccccatttaacttttttgcttgctatgagagaagttgttaagaaagataagtttttgatgattgctcatattggttggttgtgtttgccttacttaatctgatgatggattcttagtttgcttaaaatgaatatttgtagaatcttcagcatgcgtaacagatagctttttcagttccgaaactggacaaaatattggtcaagtcagacgtgaacctagcattgcaacctgcagatgctgattctttttattttattttaataataatatcgacattatggatttaacttaattaataatattatatgtatatatcatatccgtttcttttattttttcggattttttttttccttttctgtgtattgtttaaactttagagaggcatacattattcaactcagtgtataaggggagatgagtgccgatttaggttttagttgaagatgctttcaaccaaccgagaagaaactgttccgcgaaagcagctactttacgtgggtctttttcaaactaaatgtgtgtccctttcaaaaaagggtgttttttttccttcttgccaatatctgttctctcttcctcttcaaaaatgtctagttttggacctccttttcacaacctatgaaaaggcttacattggcttcgatttgctgtttccctttctgggcatgaatcctttttgactgagcttttccctgctatctaggctagaagatccattgcatgcctttctatctcaaaatatgtggatactagcttttttactttgttttaaaagaagttgctttctgaaataataacattaggagggaggcatatatagttatttatgtctcattcctagcgtccttgtaagtgtaccatttccatatatagttggagcattgataatgtacaattttttttatccagcttgtttcagtttggttgcatatataattaatatataatgtttcggaaggacaccatttctttttcttaatcttaataatatataatattattgagattgagatagttgatagaaggttaactgtagtatgaaagttaattagctttctctaatcattcgtttgtgttcaaagaataagcttgcctggttagactagtcagttaatgcacttccaagcaattgaaatctggaaaatagatttgaagttacattaattcgtaacaaaaataataataataataataaattttcattacactctcacaaataaagaagagattcatagttacattatttatttaagagtgtcctcctactctggtatttattttccaattgataaataaaaagttccttctactctattagtaacaatataggagtatattttttctgataggaaataccaattgcatttggttgctgcataaactttgcaccttctctaatctcaatcagggtttgaaacatttgaaataaccggtgattagtcgtcggtttaatatcctataatctaaactggcatgtatacatgcggtcaaaaagcagcatttgtgtaatgccaaaaagcacatggagccctactcatgtcgtggcgacactccattccttttgtttctatctgagaagttcacacttattataattttagttttctttcccaataaattaaatactaatatcatatgatgtgtactatatacgttatgataatgataattgcacaccacacacaacatagttgggactcgggagttggggcatgcatattttttaattgtacttaaaaactataacagctcgataaaggtggatctttttggataaaattatgtaccaacgcctcttataaacattataattattaatgtataaagtactcatataaacctatgaaaaattcttttgtttgttaaaaatctcacctgtacctttgttattaaatatgcaaaccatatttaaaacttattttttcacatttaatcacactaattaaggaaaattcctccttcattttgttagtctaagtttcccttcaggggcgcttggactggtccttgtgtgcgtggatagaactagagattcgctgtttgaaacaagacaggccccttggccacacctttcttggaaatgaaactgaaatgtttgtggggaagcacgcttttcatacccatgtttacattatacacacacacacacatgcctacacgaacagtaactaagatattgactagtttcgttattttgccgtatccctgctaagtaatggaccacatttatacaagccatgatctgatctcatctgtgtcttcttttcactcattgctagatctctccactctcaattcaaattgtagtatattctaatccttctacgcatttattctattaaattttcacttctagggcaaattgatagatagctcatattctagctggactagtcagacctagctcacccttttgacccatttgacaattacttgactacctctatgaaatagtatatccatagaatatctttctctgtgtgcttattctagtatgtaaaagttgcacttcgttatatggacttgtcattgttacaaataatttgtctgtcacaatcacactagcccaataagatcgtgcaagattatagctatagctcatggtggattgtttaatttaattccgtgtgtaggagcttatgcatatttcatacgtaaggcatgccatatagcagtgttgtcattattattatctaagattctaaagtatccaactgaaaataagtacactgacataataataaataaaaattaaatgagaagccatttactactaggtactgtaagcttagcttcatttgaaggctaataatcttaggtcccgagtacctctctgctagctttagctaatagtagctacctgcttctgccatcttcaatagtttctctctccacccttttaatccattctacctacttatagttaagaagaaaaaaacccacaaaaatcaaatatacatattcttttgtttttatgcaacaggattttataaacaaaagaatttctctgctttctatttttggataaataattctagggaattgcttaatttatcaatcaagctcgcgtgcattagaaagctattttaacttacagctaggtttgttaaaaaattgtgcatgcaggtatgttccacgtggcgagaggtgtcgcggtcggatctgctgtggcagcggctcacgagacgcatatggcgacgcacctatcgactgagggccacgtggcagctggagtacatgtattggcatcggacggccaggaacttctcgacagggatacacaggtttttcgacccaccggtgtttgacccttcggatcaccacctcctccagaacctgctctgtcgctgcctctccctctccgacacccacctggcgtgcggcttcgtcgacggcaccgtgcgcctcttcgacctcgaaacccgggcccacgtcaccaccttcttgtccctacacggccacctcttcgggcctttctcacgctccgtctcgggcattgttatcttcaactccaacatcgccttcgccaggctggacggggatatctacgtggataacgtgaacgggcctgggcctgggcccagccaccctcgccgggccgtggagggtgacgttgtcaacaacggggtgctggtcgggttcgcgggaacgggccggtggtgggtgggcctgttcgctgggatagcgggccgggcttttcagatatgggacgcgcggagcgaggagcgcgtgttcgttggtggttctttgacggatccagaaacggttatggggtggcatatgctgacggagttagtggaagccgtggggcgcgtgcgcgtgacggagcgtgagtatgttgtggcgtgcacggggtcgaggttggtgtgtttcagttttcggaacccggaggtgttgttgcgtgacgtggggtccacgacggggttcgtggtgagttcgctggatgcgagtcaggatgcttatgtggtggtggagaggaacggcgtgggaacggttcggcgagtcagcactttggagcggttgagtcggtttcggttgaaccggttattatgggttcacgggttgtgggcttgcattaaccttggctacgcgttaacctattcgcctgcgccttcgccttcgttgagggtttgggacattgagcaagcgataggacggttgtgtgtgacccttggggtgagagggggagaggtcaatagcttggtggccaatgacagacacgtggctatctcttccattgacaataacattaacttattggattttggtgtacaggatccttagttagacctaggtttaggaattattattgttattattattagtattaggagtactatgctcacattcattctaacttcccattcctttttgtacctatctctctctctctcacaaaaatcacatccattgttattgttattagttattactattatcatttaatctttccttctctcccttggtcactatctatttgttctacgtagaagacaggccgaggcaggcacctagtagatgttgagagtttgataagtccaaaaacgtggcaatctagcatgcatgcgttcacttggatcttccaatagtcaattataaatgttgttgggtgttcagcttgttacccatattttataatttttaattattgtatgttattgggcactgaacttggaggaataaataataattttacagttatttaataataaaacacatttatatttcattaagttccgtttttaaaataaaactaattttaacatggttcccaggagtctattactatattacccgtgttcatcgcatttgagcaaatttgataatgacttttgacctataaaattaactaaatgaagtttatttaatagaacctgatcaaatgaaagaaattaatggctctgtcactcaaaatcaaactacattgtttttaatttcctttttttctcttccattctaagctgaatcaaattaaaacacctttactgaactgtctaatactattctttatacctattattaatcaccatatcaatcgagtaaagctatcttatcaatcatttgagtatgtggcaaagatgtttggattttagttggtttcgatatgatggttatgaatgaagaaaatacaagcaactcatgacaattttcatggtgtgattaacatggtggctcaaggaacttgtaaatgagagtatatcaaacgtagttttgcttaattaatagttaaagtgatttatgagaaattatgaaggttgatttactagcaagctttgaacaatattatcataacttgaggtgagtatgacaattttacatgatgtttcaaagtcaggtaaaaggaggataaaaaagaggagagaatgcaatctgatttttgggtgctaaacgacattggtattttttttcaggagactccatccttttaaaggtccaaacctgtgattaaatttgctgagacatctagtgtacattggttgtagatgagttttgttttgttttcttctatattggtatgtataagaactaaatgttttccatataattaagaaccgaatgaaaaaaaaaaatgtataaagacagaaaaggttttaagttttcttccctgtcagaaatctcaaaatttgtatttatacctaataaaaaagaacctaataaacatctaaatttaaagttgatcacacgtgtgatttttttaaaataccccatcatttactatttatcacatcatcatcgcgtttgcaagggagtacgtacaccattatggtgccaaacttgagtcgttggttataagcatgcttctattaattcatataaatactgttcactacgtaagtgtaaatgcaagagacgccgcaagtgcaagtaagcaggaaaataattttgaagttttagttatacagaataactaaaaatgtaaaggccgtacatgcatgaacagttacaaaattaaaagcttatgataaaaatgaatgacaagttctttattagggcatttaaaagagggaatgaatgaaggacaaagtgaggtagagacatgcatggtggtagcctctactactgctctctagtccctagtctctcctgcttctatgcttgacaatgcttttcttctgctggtctgtctttctgtctgctgctgatatatcgtagctgctgctgctgcatgctactgctgcaatgcataccttagccaccctagctatatatatagacctgcttctgatatactaatatatattgctggctgcaccttcgatgtttctctctccctcatatttaattttaggctttaaatacgcgcatggcatagattgatcgagaatggaatgtaacttctgaccatgtctttccaacttcattatctcaatatgaaattatgtccttttgactcttctaggagcacttgaacaatggagggatcactttacgacttgatggtacaattcaaatatgaacttttttttcttgttggaatttaggagatagtagttttttaataaattgaagtagctagcaagtattattcattcatatagtataatacaatttttttttttgcagaatatatgcggaactgtgtgaaagagatgattagctgcaattacttttccttattttctttagctagaacctgtttttactttatttttcttcagttttttcaatttgaatagggaattatcaaaagactagtagaaaaataagtgaaaatacgccttaataatggagttttgagcaatagaattatagaagggacctcaaagattaatgtaaacatgagatgtagaaatattgatgcataaaatgacttcaagaaaacaaggggacttcacaaccccactaattgattcttccttattatgtactgtttagtgcataacctaaaagttctgattggtgcgaattaaatggagggaaagattcaaaacaaaacaaaaagaaagataagaaataggttaaatagtgattttcgttcctgaatgtgtctagcgctaataaattcgtttctgaaagataaaaatttaaattattgtcttcaaaagtgtaaaaagtgcgacaaattcatcatttcgttaacttctttccgttgtcgttaataaaagtgcctacctggcacaaaaggacaaaaatatcacaaaaatgattgtcaagatggctgctaactagattttgaacaaaatatcagtaagttaccgttggacaaaaatgtcagttattttctattggacttaaatgttagtaagttactattggaccaaaatgttagtcattttcaattggaccaaaatgtcaatacttttccattggaccaagatgttagtatttttttttggcgaaaaaagtagtacgtttccattggactaaaatgtcattaagggtaaatcttttcctcttttttatcgttacaaacatattaataacaatacaataatcacttaaaaaataggaaagcaaatataagttaaaagaagcataataatagtcataatattgattaataaccataatttgttggtcacaatagaaattatccaaaagaaatattttatctgtgtaccaaaataaacattataacaatgtattaatcattacaaatttattcaaattataataattagtcacaatatattataattaaaagacaagtatatcccatatttcacttcttcgaatcttggtggcggggcagtcttggtagattgtgactaattattataatttggataaatttgtaatgattaatacattgttataatatttattttggaaagacaagcatatcaatagattgtgagtaattattataatttaaataaatttgtaatgattaatatgttgttacaatgtttattttggtacactggtataatgtttattttagataatttctattgtgacaaataaattatgattattaataaatattatagtgactattatgttttttttaacttatgcttgctttcctatttttaagtgattattatattgttattattatgcttgtaacgataaaaaaaaaagagggaagatttacccttaatgacattttggtcaaatggaaacgtactgaccttttttcgccaaaaaaaattactgatattttggtcaaatgaaaaattattgacatttggtctaatggtaacttaatgacatttaggtccaacagaaaattactgacattttagtccaattgtaacttactaacatttttgttcaaaatctagttagcagccacattgacaatcatttttgtgacatttttgtgcatctgtgtcacgtaggcactttcattaatgataatagaaagaagttaacggaatgatgaatttgtcgaattttttacactttcggggataaaaatttgaaattttcatcttttataaacgaatttgtcagcactctagacatggacaaaaatgattatttatcctaagaaatatatttttttttattaaaggagaaataagttgaaagagaaataaaaaaaaccagactctcactattttatttctccttaaaaatgagcaaaataaatagtaatattttccttttattttgtcactattgttctcaaaccaaatattcttatttctattatacttcttatctatttttattcattctattttttactttgttcttttctttttcttttttctttcttatgaaagaatcaagtgatgcgggtgataacatgatataaataaaaatagagtaatattattttttcctgcacttcacaacccctcaatcatgtaaacatgagatccatgattatttttttcctatttcttctcttatcatattgtatttacttatcatagcctatttcttctatttttctgtctttttaggtatctaaaaagacatggggatttgagaaattatattatgaataatgatatataaatatctcaccaatacttttttatttttcttttcttatcatataaaaaatcttaccatacctatatattttactctattaaacattttaggtattacataagagtttaaggtgtctattcaacttttttcttatcttattgtctgttgggctgccgcatataatgataccgacgagtgaaactcgaatctgaaaatgaatttctttgtgtgtgtttgaattaacctttaattctttcaaaatcaatttttaaatcgagtgaaaagccaaaccaacaaataattgcttcaactttttaaatttttcatcatagtttctgggaattaaaattgattttaagaggtatccaaactattcatttagatttcagttgaaaagtcttaaattatattttgatagaaacttctatttatttttaacttaaaccaagatttggacatttccaaactgcaatcacaacatgctttgtacaatagtgacaaaaaagttaggttctcatgcacatcaagacttatgatcaaaatcatatagcataagattgtacttcaaggaagaaaataaaggagaccggttttttttacagttatatgatttttttaggattaattgtatattttatcattcaattattattatcattttacaaatctaatcactcaattttattttacaaattttatcacttaaattttaaattttcacattttaccacccaagtattttttttttatttttaccacttgattctttttttttttgcatttgattattatattgataacaaaacgacatctttttgtaaaaaataactttttttagtgacacatgactatcagtaaaatgcataaaaatttaaatcttaaaatgataaaattcatgaaaaaatactttaaagtaaaatttgtaaaataatgaaaattgtggtaaaacatgctattaatcctttttttatgtataaattgttccagtaaaccaaaaattaagaatcaaggttaaagataatttataaactacctttcccataacctataggcttgaggttgagacataagtaaatgagactggtggatcaactcgaaattcacaacttcaaaaagacccaaattacaaagagacccaatttagctagtatgccaaataaatagcccaatcgtattcaacaaattcttgatttaacccaaaaactgaatcgagtgacaatttttgggttatacaaattaatctaaactgcatggtaaagtattacacttaaatatctaggacttgaagctaatcggacacagctgcagatatataactagaatcttccaatacgaatgttaaaattacaaacacgcacagccataggtgctgagcctgagatttgttacagaaatttctttccatgcaaaaatttgtgtcgacatagcatatctgttacaagcatcttatagcataacttgtctaaaaaaattgcagctgtcttttgtatgcttgcagaaccgctatcgccgaaattttaaccagtggcatgcctagtaaaagtttgactgcaaacgtgtgcacaagcttctactgtatacagtcattcacctaaaatattccaaaaagatcaaatgtcagcaccccggtaagtatgccttagccttcaggctacacatcgacgtcaatccagctgaaggatcctttaaaattataaaataagaatgcatttttttttttttatattctgtggaaagaaactaaggatgcatttaaataaagaatttcatttaagcacttatttaatatactcctaccaaacaaaaatatgttcataaaattaacagaattactgagataagttaaaaaaaacttattttaacaagtttatctgtaaatcttattaaaataaattgaaaaaaaaaacttataaaagttgtgaactactttctcacaagtctattttttttttccaggcaccccccagataccattataattctgaagattgcttgtgccgctatatgtagtatgcttgtaagtgctagcttctacaaaagtatttgctagcttgctaaaagatacaactatttcattactgaaatcatctcattcttaatcatgaataatagaatccaagccctaatgtctctcgcatctcaaatcaaactgccagttaagcaacttcaagtaatcaacgaacatatacatgcaaaatgtcatagataaatatgcagaaccaattttcgtataaaagaagaaaatgcaggtcacagcatagtttttttacttgtaggaccctgatggaagaacataaacacaatgataatagaggagcaggataaaaaacacaccaagcagagatgaaaagaaagcagcaactagacaagccaatttgaaaatctgttaccaatatattctcctctagcattccatgggcgatcttcaaaggacttcccaataatattgccttttttatttagaattccctcttgacagcagtactgtggaaaataatcattgaatgttttgcttccaagttcatcgactccattaaagagaaagcttctcaacatatcctagtataaaacaggaagtgaggatgtgtagtactaggttgtagaggaattaaataaatcgaccacaaatttggcctaccttggcaagtgtgtcaccaatcagcttcttcaaaacaccttgtcccggatcctaatttcaagtatgtccatgaaccaggtccattaaaaggtaaaactgaattagaaatagattatggagaagtctttttcatttttccttcttattttctttacctaaaagtgtttttggataagtttatccaaacatgtcctatatattctatatagttcgaagttcaaaatttattccaaacttatttgacaattttattgttgagatttgaatgctagaaaatagctttctacattactctagaaacaataagttaggtagcttttttgaagatatcaaattcagcataaccatctttgttaatattatcatctaaattatcttcaaccgatgctaactaaatgagtgaagatccttggtgaattagaaaatcctaaaccaattatacctgggacaaatataagtttgcttatggctagatcagcaatcatatttatgattggctgtcagaaaatttagcaactgtgaactaccttttcagctctccatgtcagatatctatgttgtgcttcgagattgtgggaaatctgagattcatctgtctctttaactgctttgcatatcaattccaaccatacctgccagggtaacagtcatcaagagaaaaaaattacacgtgtacaaggtcagttttattaaagttcactaaatatattatactccctccattcctatatataagaccattttcagaaaattcttgtacctttttataagaccattttctacttgtctcttgtattaattattttttcctaaaatatccttaattaactacaaattttttagcaaaaaaaaatatgctggaaattaacaagataaactctttctcttattatgattggagaagatgagtagccacaagttacataatcattactctatctccaaaaattaattaatgagggaggaaaaaattaagtggaaagggagagatgattaatttaaaaaatattaagggtaattttgaaaatagtataaattattgacaaatttaatgtcacaaactacattaatcaattttattaaagagagtgaattagttgaaaggtcttatatataggaacggagggagtatttagcaaaatatgaatagtcattcaagaagttgaccataatgctggggttattaccttgtaatattccctaaatgcagaatacaaaatatcatatttttgtgggtttgaggtaaactttgtccagatgacaattggcgaaaaaaaatttatggactcacttgtgagcttccctccccatggaaaaagctgcataaagtcagtgttaagtcaacacactaggtcatttaagaaagaattttcttatctatatatatatatataatttttgctggccaaaaaaaaaaaaatttaagaaagaatttctataatttacagaaaaacagagatgcatccatgatgaggacttttttaatgaatcaatactaaatggaaaagtaaaaaatgtagaattcgtattaaaacttaaaagtatatccagttttagaacaatgcatcactcatgtggctaatcaggtcaataagtagctgttattaacaaaactttgcacattgttatgcagtcgagtgattaactgtttctaaactgaaaatacttctaccaataattcttataattttcgctaaaatatttgcagttacctcagcatatttaaggccaagaggaattaagcttttaaagtacttctccttgtactcatactgattgatgatatcatgcaaggggttaaggtccctgacataattaattcaaggttagtgctctgcattacatacagtaatttgttcttaaaaaatgtttgaagctatcaatagcacagtgggggaaaactttttcgcattaccaatgatgtcagtgaacaaatattagatttctaaaacgattaaggtgtaaacaatattggggagaaatgagaactacagactgtcacatagatttgctttaggctttatttctaggtaaagcatggtctctttcattatgttattttggccaagtataaactcccaagtaccattatataaagtacatgcactgacaatatgactaaaaacaattaaattgagggataagtaatgcaacataagaaggctaacagtagattatcaaaaaggatgacactataatattcttccacatctgagtaggtggaaaactttagtagacatgcagcacacattaaatccttgagtttgtatttactgatgaaggcatttttttttctcatttattataacagcttcaccaaatagttctttctaagattggatgaagaggagtcaataccaatcttcttccaaaagcctacaaattcaaattaaagcatacatcaacttcagatctaattttttattgtaaagctataatacataagaaaatgaaaagcgaaggccaacaaggacatttttggtacatataatgtaatttcaagtagtcaaccaaagatgctttcaatgctaaaatctcctttacatagaatatgacatatgatatcttaagatgacaaatatagcaaatttactgaactatggtttcaagatcacattttaaagagaatcaaatagctgattagggctatacttcatctttttcaaggttcataggaaaaaaaaatagcaaaaccaaagggctggagtaaaacaactactatttctcttgcttaaactaacattgagatctaggacatctgctcctaaaatgataacttcactcttcccctcaagctccgtttggttcatcgtgtggacaattcctccacaatcaatcttcttttctggaaatgcatgcttttattcaatgagaaatataccataaaagatacatgaacctatttaacaaaagaatgaaacatcctcttcaagtgattatgcaagtaaatttacacctaatgaaatatggtattttcttttaccaagtacaataaaatacctgttactgagactagttgatacttgataacctactttgatgagtattagtaggcaatgaaacatatgcatttaccacacccaaatgaagacataaaagttctctgttgtgtgtacctcttgaaagtatatattcacatagatcaaaggctggcttatttttttaatttaaaactgaatgattcctactttgatttgcaaagcaacccaagataggttttcataattaatggtaaattctttttggatgggaaaatattgcattcccatgcataaatttccataagctgaaatgcagtttaggaataagtttaaaaattgcaaacatagcccatattgctagacttttccacaactaaaagtaaaatatgagaagaacatcctttgtacatttatataagtggattgcaacagtggaagaagatgctaacttacaacacaacaatgtttgttttagcagaggtgaaaaagttagcacaaaatatggggacatcatattctgcttttggaaagacagtaaaatccaaaacctgcataagaagttgaagacaaaaaagagaggcagtaagcatgttgtaaaataacctttccacagacaggacacagaagacagcagaacatttcagcaatgacatgtcaatttttttcttgtgttgttgaaaacttgaaatagaattgcaaaatataaaacattaggaaaatggaaactgagaaatcacataagctaatcctaagagaatttctaagatactctaaaatattccaagatataatattgatgttatgagatattccgacaagtgttatacctcatggggatcagagattgcatattgaaacagatacaacaggatgcttactaattctgttaacatgcattgttatagatgaaggatcctttattggtaaaggaaaaagaaaactgaaattggcagaaataaatacagacaaagtcaaattttgaaattgttattgctgtaataaattacaaggtactacacaaaggcatattgtgttaagacagtagtagataccaaccatatatcaatttgataattgataggcataaaaaaaaaccacctgcattgtttcagtctcaatgatcaaacttcgtagaagcctaatttttgcagcttcaaatgatagcgtactaagacttcctttaacatccttggaattcatgaaactgaacttttcctagcaagacaacatacaaaaatgtagattgaagatctatgcacacaaataatggtggagagcaaattaagcgaacaaagcagaggagtcgggaacaactagggacagaaattcacaactaagaatcttcaaagcaattatgtgttcaataaaactaaatttaaaataatactataacaaaatataaacgaaatacaaagttgaataactcaataacagcaagaaaataaaagttaacggcttattaattgaagagctagttctatcctgagaagctgaaacttggtgattggaacagtacaccacatcctcaacagggcaacacaaaaatataaaaggacaatatatgacacttagtcataataaaactctttttcatctcatgttttttcttccataataaatggaagatgtttattaaacattgaccaaaccaaagtgattgtttacttcatttatatttattaaacactgtcatccaaagtatggtaataatctcttggttttgagcactaaccagagaacttgttctatagagaagttcattcaatttctttttctcttcttcctcagggtcggccaaagggtaagtctactaaagttatagttttacgcctaccaataaaaaattattagttattagtttttataaagttgtgtcttggtgacttattggtcatgagttcgaatctggaaacaacctctttgcatatgcaagggtaaagctgtgtacaatatcccaccacctatctgcgcatagcgtggagtctccagacaatagggtacgtagtttttttttttaattagtttttataaagcaaaaaggtcacatatgttggcaaaaaggcctaacatataactctttcatctaaaaaagaaaaaaagtattttatcaaaatttgcttcgattatgtacagatgcatcagtaaggtaaggttgcatttggtatatggacaaaacataatgaaatattgcatttcgctcagttctccttgatttcacacattctatagaaccccaatgtgcatttgtttcaacttttaagtcctgttgtatttttaaatgcaacataaaaggaaaattcacatattatgttttgtccgtttcagctgacacatataccaaacactgcctaaatttggtttgaagaattctgcaaattaagttttaaaaaactacaaagcggaaatttcacattggcttgggattcaataccagaatggaactaactaatcctaatcaaccattcaaagtccaacacatacaggaaaatggccataattttttagaaaaaaaaaaaaggaataagagaaacctgtaaaggcgaagggatcaagtgagtgtggcgtttggtttcatccaaagcaaactcaacaaacttttgataagatactgaacaacttggtatgcaattactcctcctcatcctcaaggcacgagtagaagtggctatcgctgttaacggaggaagaagcgtacgttgcaaagaaaagcatgatgaagaggaggaaccgctaattctaaatcccatttatgttaagcagcttcttctgcactgaatcacaactactagttctaaattctaatgttctttctatccaagccagccacacgtgctcagcaactttctctgtttctacttttagcgcaacccatcttaggatgctttggatttgtggactgtgtggtccaacattcacgtattgtaatagcctgtgggcctcatcatttggcccaaatgaagatgtccaaagtccaaattaccctcctgtctcactgtcgtctctcatacactattcaatagcatttgacttttcaaattcaattaccaagtgaataaaactaaactaattgccaatgattattaacttaacagtaaaatatcattcttcttctcaccatgacattaatgtaaagtatttattattaataattaattttcgttaaaaaatataattgatcacgtttaataaaacatctctcaaccatattaacttaattgtaaaatatcattttatcaagaatttgttaatactgaagaatttttatttgaaagaatgtggttgggacactttaaattaaaagtcacttaaagcatctttagtgtaagatcttaagcaaagatcttaagcttaagatctgatcttcattagatctcccaataaaggaattgaagagatctccaccatgaaagatgagttcttgtggaagatctcttaagatctgcacattgttcaaaaaaataatttttcttcatttttctctctccttaagatctcaaaatgagatctaccattaaataaaaaaatggaagagattttaagagatctttaatcctatttggtattatgtggtctaccaaaaagtagtctaagatcttaatttaagatctaccattaaagatgctctaaccttaaaagagatgagaggaggagacaaaaataattaatatgattggtggaagtgtctgcaagtataaatcactttgttttttttttcttcttatcacatcattcaaactaagtacatgtttggatcctaatcactcattcacctttcacaaaaatttcacatgaaattgtatcaaagctaatttgattggtttcacggttttaaatgtaatttttcaagtctccaatgtcaaaagttaacaattataactttcacaatctaaacataattcctttcctcttaaccaaattccaaacacgcactactagttgtttcttggatgtacatccaaattgtgtggataaaaatccaaacgaacaagtaactaatctcaatcttcctactacatctggtggtttcaattagttaataatggccaatgagtgtggtgagtgagcgtactgtgtgtgcggagctagaatcagaggaagaaaaatactaacatttttatttgattctaacattagtttactctttatcattatatgattataaattatcaagtttgttggctggcttgaacagagaaaacactcacaatcaaaggggtataaattggaaacacagatatagcaaacacaagaatcaaaacaagtcaaaattttgagggagggagagaaagagagaaattaccaagaattttagttgttgagttaacaattaacttaagtgtaattaggggaaacataagtataaaagttttggttaaaattcactaaaaagtaaacaagtttgaagcaaaattaactaaaaagtaaaaaattaagaataaaaagtaaaattattttagcatgttacgtcaatttaacggtaaaaaaataaaatttgtaatattttaaaaataaaagataaaatatgttaaattaatttattaaaataaagttggccaaaaaataaaaaaactaacaataaaaattacaattcgtcaaataaattataactcttagacctaacaacaagtaagaaactctcatcttaccttaataggtttcggactaatgtgacaaagtcccaaaatcacatgctcaagttcttgctttgcaaattgcactcttcttttgcctattgactcaaattagttatacctatttttacattattcaataacatttcattgaatactttcaacaaaaaacttataattgaattaaaaagataatcaaaccgaaattatttgatctttttgatgcacatcaaaattaacctaattcaaattttaaaaataaatgaaaataagaactattctttgtattgttgtccaacttttacaaaatttgacataaataattcaagtaaatctcctcttagctggtaatttcctagcatatatcagccccccttaccaacacaatttttattcatataataatgtcctggcactgccccttctgttggtgcagtttttattcacacaaacacagctttttgtccactttccatcagcttgaatgattagggcttaaagttaaaactaccataaactagtacatacagtagtatgtaataagctgcaatgcgcgcaaaacaactctgcctctctttttggacagcttgggacaatgtaacactaatgaattaataatttgatggttaacaaagtttaattttggatccactaatagtaacttcttcccttgtgcttgtatgacttgttggcatcctctgagccacatagtatttgattttatgcttaacatcactgttttaaagatgccttgttttgtcagagcacactactcacgtacccaagatttgtgatagatagcaggctaggaatttagtgtccagattgaggaagtttcttccctccccttgatcaaagggaatgaataatgagaaattaataaatcagtcctcaatcccatgcaaaagcaaagacacaagaagaaaaacacaacccatttagctaaattttcaaaataaagatcagattccacagttacccactcctagctaagagagtagttaggagatagcgttgatttagaaccctggctgtcattgcattgtttgctttccccctcgtctttctgtttaccttttacttgcttgtttgtttgttctgtggatgttgtttaaagcttttatcactacatacttctgctaattgcgagatcacaaatcattattatgctataatatattttctctaacactaattaattataacctagtataatattgatacaccattaataaccacacaatactttattcttttagacaaaagaaaaaaaaagaagagagtaatacacaaggagtgatacccaattggacgtactttaattttgagcaaaataggcatgatatccagtggcgatctttgtttttgtctttttaccaaattagtgtattttgtttttaaaattattgctaaacaagtgtagtttttaaaaatttacccacataacataagtaagtcgcacttcatgaatatggtttccttttaaactttttatgcaattttttttacagtttataatagtaatgtctgttaattttggacagtcataaatgtttttggcatttggtaaaaaataaataaataatataagcaagacttacccatattgatttttttttttttgtaaataaactacactagtttagtaattttaaaaataaacaactttagtttgatagaaatcctgctattttcgagcgattttgaaaacttaacgtttatcgtttctatatgtttgtttaattgaaaaatgaaaaaaataattacttgggagagaagtggaattagagtgagattctttttcgtttatcaaacctctaaattataatttaattgaaattaattatcaaattattggttgacgtataatataataggaaattgttgaattttataataattaattactttaatatctctttattaaagtcttataattataggaataatcaaatttagtaagtgaactacaattgaggtatacttcacttttaaccaaagaagcgcccgatcgggaaaaaagaagatgtgaatataccattttgaccttttctttgtattttaagcatcacatgactattctttatagccattaaaatatttttatgatttatgtataaaatattcatcttaactaatgtttgggttagccggtatatatgttacatgatctatctacaacaataatttgtaggatcgatcagaaagtcctaattaaacgataaagaaaacaagaaacgaatacaggagaaaggtaagtgagaagatgagattgtataatcacattaacagtggaccacagttcacagatgattggctctataattgaactctgctctatgttgacgtatggtcatgacaatggtagaatctctgatcatatactagctagttgaccaattggtatgtgggcaaaaccttacaagaacaaagtacaaaggatagttgttggggaagaaaagaaaagaaaaaaaatatcggtgaaaatatttttggttgcaaactttactttacggccatctccttgtagttttgcagttatcgagttgctaagagcaagaatagggaacagtgcttcccctcgagtgtgtccaacgaacaagtccaacctaataaaaacaacctcttatgacacactctctaatattgcagcactgagtgagtggggtccagtctctctccacagaagcctaattaataaatcaaatgtcaatttcaagccccccctaccctaactaaatgaaattatattttatgctttctgtctcaaaggacttggggcttttgcttttctttgtgggagaaaatccaaccccgtgagacattgcctcaccatgtcatctgaaaaccttttttctttcttgctttctttctttgttgctattcaaattccacatcaagtgcaaaaacataaaattactgtagcgtgacttttctattcgtgtgcctcacaatggaaggaaattactttaggcacttctttggtggaacatgatccatcctcctttcctttccatttatttattctaaccattcaccagcaaaaatttctttctgcttctgcttgctccagtgcgttctctttctgtttctgaattgcactgttttggtgttcaaatgccaactcgattggaacgggaaatacaagttcatcttattgtcttcaagttaattaatagagtatctttcttaatttcctgatccaagcaaattattatattatttgcatcgatcaccattatagttgttcaagtcaatgatcattattaaaatgtatattctatcaaataattaattaagtaacgcagttcatcttgccaaatacaaagatatcctcattttgcgttacatattcattaagatttgaattttataataagtttaataaaaaaagaaaggaaattatggcatagctattaagaaaataattcattttaattctatatcatgagaattaaacattagcaagaaataagaacatagcagaccaaccaacatctgtatgtgatatgattaatgaataattttgtcctttaaatatgtatagtcttgcgtttgattcttaacatgtgaatatgaaaaaatataaatataaatatattttttcctaaaatttagtatttattttatttttgtaatttttttattttattattcaaaatgttatttaaaacattttaagaatgaaaaaataaaataaatatattttgtaaagattaaattgaaaaaattataagtatataactaaaaaaatgattaaattgcataaaaaaatgtatttaagttaaaaaaatatattgaaagaaattaattccagatttaagtattttgatccttgagattcggaaaagggatatctgattcattaaaaaaaaaacagaacatactatatttatattttaaaattacatcagtgcatcagttgtatctttgtttttataattaaatgaaacatttggtagaatcagtccaaggtataagtcaaattaaaaagataatttaagcaaatcttgaaaactgttggaatccaaagttttgcttggagcgtaggaaagggaaacaatgttacaaaattatatagatcgaggtctgatcgttgacatggaggtcaactcttgctagatattgtacctagttactagtcatgcatcgcgtgaatgtagagttttcaaccttatcagcgcacttgccagctattcacgtgtatatatatatatatatatatatatatccaactttgcagtggtatatatatgcaaataatagtcaacatattaatgatatttgtatattattttttattatattttcaactaataaagaagaataaatataatttaacattttttaccacataatatattaaatgaaagatagtacaataatataaaggtaaaatagtcgataaattaataatataaaatgattttataattattttataataatttgtcatatataataaatttattaattacttaatttaaaaatcatacataacataacactacgtctagctaagaatatatttttgactaataatattttatgtttagatgagtgtttgtaaaataaattttaattaaaattgattttcaagtaaaataatttatatttagattcttttaaactaaaaacaaatttgctgtaaaaattaatataaatttttcaactcaaaacaaaaactatttcctatcacttttagtgcacgtgaagttccacacctagaaggaaattacaaattattacttctacctcgtttatttatatttgatataattttattagataacatgcattcataattataactacattgtttaagactttctaataactataaattataattttttaagtgtgtatctgtgataacattggatataacgcaatgcagaagcaatttaggtattactttggcttttttgtctcagaatgctaaatttttcatttgatgtggttgcaacgcctaaccaaacataggatacgcgtcatttcatttatttgtatatgacacaatttcattagatatgcatgcataatgtgtaaccaaacacattcttagtcaaaccaggattttaatcaaagtaaaaatagttttatccaacaatatattcaaacatttatatttttactaaattaagtttaacggaattcaagatcaatgctttctactatgaaatggaacacactcaataataagatatgccaacatacttattcaagtgggaggcttctggtttataggtttcccaatttttagacttgtaggctgaactgatagatcaatatttggtgatgaaacaggcatggcatggccccatagaaaggtaggaagcctcaaattcacacttgagtatacttgaatttaacctctttatactactttattttgaaaaatgaaaaaaaatatatggtccaaagtctcgtccagaaaaaaaaacacaaaacgtctgcatagactgggtgacaattaatcatgcaacagcacgacgaagcatatatagaaaaattcaaagttagcgaactcaatttcttctctctctgatccgcaacggtcctcaattgatacaaggtattggaaaagaatgcaaacaacaacaaaaacaacaaacaccaaatctgctcaccccgaaacctatatagaaaagcaacaagaggaaaaaagcaccgcattggttccagttctttggttaatttggaacttccttttggccccttctctcccctcgatactcacaattaaccttctctctctacatgcacaataacaagtccaaccacaacaacaaacaacaatccaacgtagtaacaaatgtaaacggtctctcccttcacaagttcacgtttattcattaattctttccccaaaaagtcaaaatatacttctcttctcacacttaaaaccccaccctcccccacacacttatgctcactttttaaacatttaattaatatttataatttttctttgtttctctttttcatattacatcataatccttataatattttctttttctttttctcacattagctatataataggatattcatgaatatttttctccaaaatcattttgtaaatttttttgtcgataattaatcttttgttaaaaatatatttaattatttttaatgaaatttgatctcttaataaaaatttccctatataattatatttattatatattaaaacttgggactttatctagagaatccaaatacagtttcactgcgagaaacctaatattgttaccccacatttatgctgctccatctttcacatgccacactttcttcttaaaccaaccattccacttccactagctagctagataaatcttctctttctcttttcctcttcctgtgaataatatcgtgcatgtccgcaactatggtgcagcagcagcaccgcggagagcaagagaaacgacatcggttcttcataaacgacaacattgacattctccgggaaatccttaaacgcctcgacggtccctcgctgggcgtggcggcgtgcgtgtgtcgactgtggtgcagcctcacgcgcaacgacgactcgctgtgggagcacctgtgcttccgccacgtatcctcaccgccgccggcgtcggtgagggcggtggtggtagcgctgggcgggtacaagcggctgtacatggtgtgcgtgagaccggtgctgagtcgactcggaaactcggagcgggtgaggaagcgagtgtggactcggcacgaggtgcagctctcgctctccttgttttgcattgacagctacgagaggctcgggagtggaaggatccccagcgacgcgtccgcatcgtccctcatgttcctctgcaacactgtcaacgtctgatctcatcatctctcatttttccaccatttctcattattcctttgatatcttaccaaaaaaaaaaaaaaataataatcaaatcttggtccctgccttgcccaggaaataagaagcacgtactgccccggtattgatttgtctaccatataccaaattaaaatatcaccaatttgtttgtttattctcatctcttaatttcctcatatttttgttatattatattataatagaattttttatcagcaaacattaatgattagtattattagttgttattactcataaatttaaagttgttaactattttttatcttcttcttccatcactatatcaatcttatatcttaatgcacatatcaataaaaagttgtgataagcgtggatcagtgatgaatgggtctttatcttttatttgtgtatatgaagctaggtagttcatttgacaatcaattgattttgttaaccaaggtttaattagttgaactagtactctattttaaactttgctttattacttcctatcatcgtcctccatttttttcttgagtaatgttttatatcatccaacttcatcatcttactagtttttatagtaagtattgaataaaaataaaatatttaatatcttaaaaatataaaaacttaccacaaaagatagtagataaatttgtagaagaatgaagtttgaggatttaaaattatttatttttctttaatttgattttgccagtaaccttttccttttttcttttttttagttgccctccttgcttccttccttcaaattactttttttctttctttacggcgaagttagtaatcaatgcacatggttagcatctttttaatttatgtattttttttaatccttctaaaattgggatagtaccgttgatattctattaactatttataatttattacagtaattgggagctatagcccagtttagaagtgttattcgtaattcacaaaaaaaaaagtgttattcgtacactccaaaggcccagagataattcactttttaactttttcagtaacaacgtgttcccccccccccccctccctccctccctctctcaaaagagtaatgttatttctataacaaaattttaccataattttacgtacactttcactttttttattttatctctttttattacaccattccttctatatatgtttttcttctttttaatttctctcactcgtgtattattgtaaaaatttgttccaaaaaatttatcaaattattaaatatttactgatatgatctattattataaatttataattgttaaaactaaactgacattaaaatagatacaaatattttttttactgaatagatacaaatatatataaagttagctagaaatacacctaatttatatgtcactataaaaacttcaatttttgtcttcgaatctaccagtcatatataccaaatgtattttcaaataaagaacatgatttatttactttgatattagtcttttaagtttttgtacaacttttataaaagttcaacctaatttaaaggcatatttaaaagcttattctatagccaagttttttaaatagaaaaacaaacctaagtgcactaaagcccatggctagcgaatcttcttaactttcacggaaactatcaaagactaagctttaattttgagtaagttaataagcatataattttgagacaatcatagaaaaaatttagtttttgatataagtaaaaacaaagatgataccatcttaaaaaaaaaaaaaaaaaaaaaaaaaacaaagatgatactatttttttttactgatgagacattcaaatatataaacttattgaactgttgagaatatttgtaattagcaaattctacaatacaatactctaaaacggatacaaagcgggcataaagtgtaatattttaatgatatcaatcatggaaaaaatatgatatcacgtcaaatttttactagataatcatattcaataagacgggcaaatcaaggtgaaaaattctttgctgaatagtctatttttgaaatggcggggtagcacaaaattttcaaatgtcaaaatcaaaacttccatctccttcgttgattaatttaattcacctccgtaaaaggttattttacagtatgagtagtgttgaagaatacgaaaaagaaaaaaaacaagtgtccttcttattgattgagacagagcaaacacaatcaacccagtggacaaacaaacatgttactgtgatcattgactcaaagtatgcatccaatccaaccacttcaatttttggcagaaccagatttttcaagattcaactgttgtccgtttgattctgtactcaacatcatttcatttcaagtttcaaccgatacattaatattgttttggtccttcattacattaatattttttttggtcaccacattacattaatttggttgttactttcagagacgaatgtcattgggccttccccgttagcccaaataaatatttcagagaccccatatttttgctggttaagtccaaattatttgacattgacaacttgaaatcgatgtcagaactcagaagtttaagtagaactcaacctaaaaaattgcaagttcaatcgcaccaaactggttaaaaattgtaaacccaagtgaaataaaatggttaaaaatgttgcatccaaaaaagaagaagaaataaagtctttcttttttgtgtgtaagaaagtagtaagtcaagcacacacaaaaaaaggaagtttagattactaaaataaaagtagatagattatacacccaattccaattattacatttatacagtcatttatgactccataaatacgtatttaatgctaaccaattaaaatgtctacaataataccaatcaaatttgaatttaatactctcttcatttttatttataagattgaattgattaaattatctttattaactgtcaaaaataaaaatgttatattaaatcttgcatcattagactagtgggttattttaaatagttttataatatcttatattaattctctttttttataagatgggaaaatattaaataattttgttgtttttaaaaataaaatataaaataatcaatgtggagcattcacaagtgcccaatgcccatcactgataattctccaaatcatcatccaacctcacaccaactacagaacacagtctctaacttccaacttccgcaaaatatataagtttaaactaaatttaagatgcaataaaaaaaatgcgaaacataaaacaaaagaaagtattagtagttttctttttttctttttttcttaaaaagaaataataaataataataaatttgctatgcagtctttagtcattacgcacctacggtgcacgttagcttgttccaaccacctcagtaataacagcgtttacttgctctgaaaattatcatcattttatttataataattcctatttttattttggtctcttctctttctgatcggcgattgtcggaagctcctattcatcgccgccaccttgcgccgaatcggacccacttcggatccgagagccacccgaatcctttcttcacagtttttgtttttccatagcaaaggcttcacctttaccatttaccacacaccactgtgtccatacaaatcgggttctgtgttttcctgtttttagcgaagcgagattcacacacaattttgcttcatctcgtaactacacgtgtcgatctggctcttcttcaacaccccattatcgtctccaatctcagttagtttttttttttttttttaattgttgtgattatttttattgcatatgcctttttttttttccgaattaatttaaattatgagtataaattttgggggttttagtcttaagactttcgatctatgcgcaaaagttttaggttttgtcaaatttgggtgaattgggtgctgattgaaagatgggtcacctctacccgttgattaatgttttattgattttgaaattggaagatttaggaaatagactggaaagtaaagtttaatgctttatgtggaaaattcaaaaattgtgtttcaatcaactaaatgccacgatctgttcgttttattccacatttttggcgtatttgagatggagggttcttggtttctcggtaacaatagggagcataagttctagattgatgttggcaaatgtctgtttaattttgtgaaaatgtttgagttggtgtttttggatctcagatgaaagttttgtgagttttaaaattaaaattacttacttggttttttttgtttcaaaacttttgcagagatggaaacgaggttatgtatgatattggaaaagatgttgggctggtcgtagtttctgtttcaagagttcagttgtgaagtgatcttttgttcctacatggaagcaaacaaggaggaagcacttaaagcgatagagattgctgaaaagcgctttgctctgagagactttgccggtgctaaaaactatgctgtaaaggctaaaactctctgtccaggattggagggtatatctcaaatggtggccacatttgaagtttacattgcttctgaggtcaaacataatggtgagctagattactattcgattcttggattaaaaccttttgcagataaggaggctgtaaaaaaacagtacaagaagttggcggtgttgcttcacccagataagaacaaatgtgtgggagctgatgaggcatttaagcttgtttctgaggcttggacttggctatcagatagtgctatgcgcagttcttatgatctcaagagaaatgtgcagttgggtgggactaaccagacgaatttgtctcctgcccatgctaaaggggccgcaggttataacaaatattccaatttgtcaacccctcgtggtgggcttgacaccttttggacaatctgcacctcttgtaaggttcagtatgagtatctgcgcaagtatgtgaataaaagactctcttgtaagaactgtcgtggcacttttgttgctgttgaaactggggcggccccagcaaatggttcgtttccatattgtccttggtcatatgtagcaggaaatgggtatggaagtcattcatttgatggagttacatatgttccaactagtgcccctatttcaatgggaatggggtcacaggataccattctggacatggatatgagtacgtccccaatgtttcatttcagtggggctctgctggagttgtcaaccaaaatggatcagctaccttacctgctgattctgttcatcaggccaatggaaatgtgaagaggggaagaccaaaagtcaagtcaggagctgataagagacatcacatggtagagactatggtcaatacaaattcagacataatattctcctgtagtgaaccacaggaagataaactaagtagacctgacaagaaacagaaagttgttatgggagccagtttcagaaatggctatgaagaaaagggttcaaaacgtgcttcagagttgatagtggctaacggaaatgatagcatgggacaatgccaaaagccttcctgcacagttgaagttcaaaccaaacaatgttacatggcaccggcctttgacgcgagaaaattgttgattgagaaagccaggaaagaaatcaggaagaaactggaggagatgaagttgtcatctgaagcaacagcagcagcagtagctgcagctctgaatgagagagaaaaatcacaagctgaagttggtcaagtaagaagagagacatgtagaaaagcagctctgaatgtttctggtctacagttagagaatgggaaaactggtccaatgtcaattactgtcccagattctgactttcatgactttgacaaagataggtcagaggaatgcttcaggccaaagcaaatatgggccttgtatgatgaggaagatggaatgccacggttgtattgtatgatccgtgaggttgtgtctgtcaatccatttaagattcacatcagttacttgagttccaaaactgatagtgagtttggctcagtaaactggcttgattcaggttttaccaaatcttgtggaaatttcagggcttttaattcagatgctgttgatcaagttaacatattttctcatgttctaagtaaggagaaggctgctcgaggtggttgcgtccgaatatatcccagaagtggagatatttgggctgtgtatcgaaattggtcgtcggattggaacagatctactccagatgaagtgaggcatcagtatgaaatggttgaggtgctggatgattactcggaggaacttggtgtttgtgttagtcctcttattaagttagctggatttaaaacagtatatcagagtaatacagacaagagtgccataaaatggatacccagaagagagatgttgcgcttttcacatcaagtgccttcttggttgctgaagggggaggctagcaatttgcctgaaaggtgttgggaccttgatccggctgcaactccagatgagcttcttcatgctgctacagaaccaaatgctttgtaggttatgcaatagtgaaaacaattatttgggttgtgctttagcattcttcccagagtattttagatttaactgtacactatgtctctcttggttagagaccaatgagatattaacaacggatgttttagaaggtgaaattttattttgtaacatttgtctggtagactttaagatctagtgatttgcttgtttggtaaagtttcttctctgtaactcttgtgagagaggtcaggacagattgcctgcttgtaactctatttccgaccagtttttactggttggtaaagaattcattcaattaaaggctgaaatcaattttaaatccaacaactttaaagagagaaaagaagaattaagaggattattgtattgtattgtatgcaagtgagcaagtatgcagaaaattgttaatttgatgtcactgatcctccttttccgaaccgaatactaacgggttccaaaacaaattgttgagcttagtactaaaacgttgataacctttttgagtgatgactaccaaagctagtgtttactcttattgaaactacacttataatgctacatctacatgttagataacaaacttttcaatttgtcaacctcgtgattggcttgacataacttgtcagaactgctgtgggaggggcactttcttgctattgaaactatggcagtgccagcaagcagtccatttggtcatacagtcatactcatacgtgcctaaaatgggcgtgaaatccattcatttgatgaagttacacgtatttgttctaactagtgccagtagaatggatatgaaagtatgtattctagttagtgccaactatttcaacggtaatggggttacaggatggacatggacatgacaatgttcaaaagtttcagaggagctatactagaccctacaatcaaaatggacctaccaccttacatgctgatatgacaatgttcaaatttggcaatgactgcggtcaatggtcaatataaaagatgtatcattctgtcattgtgttagcttataggatacattcatcaatcagcttacaaactcagatgtatcattctatcactcagatgatcaaacccgaggcatatattgtttacgtgagttcaagggataagagtattacatgatatatacactatgttcatcaatcaaaccataggatgcctgcaggctgcagcaatgttactttttaaggtaaaagctgcaaccatgcatgagtttattagcataagtctgtgctaacaaaactactggcatattttattttggcaatttgatttattttagaagcatgacagtgacttaatggttattgatgttatatgtgttacagattattttcatgccagatataaagcacaagagttcacgtgaatactcgagaatcaagattttgcttctaaaagactaaaactgagtcatgcatgcattgatgatcatttgttaatgtcataatatatagtcactggcttttgtaaatttctatttgatacaagattgtcattcttagcttatatatgttggatagtccgagaacaatgttgcttcagatgaacagagagtaggggaatatagtttgcgtaattcagtctcattactcttagtaaagtaacacaatattatcaaggtggagcttcaaaagagattgcagaaaacaatagtcaactatttgtcatagtcaagaatttctggggattggttgatcaagcttgcattgagattgcacgtgacatcagcagaaccccaaggcaatttccaattccagctaatcatcagcagaggaactaacacaaagaagtcatgagattttcaaactgttggaatatatatatcatattagataactctaaaaatggattcaacttatgctagagttttgaataattggagtctcaatagcaagacacaagttacgatggcaccagaaagagtttgtgaaaaacctgcaactcaaagaccagtgttgctggcttgctgctaaccattcagaaattgaaaccatctttatggttataccagttttctagtgttaaatgtctaaatgtatgtgtcaatgtgttaaaaactgtattgctctagtgtaattttaattctcgtgtatattattgttagattagtttaccatcaaccataacttggttgttctcttcttgtcttctgatgtgaaatcactttgtagctcccggatttttatgtacaatttgtagtttgattgagaaaaaaaagtgatatagttaggcttttcactttataaaaagccaaagagggagggggatgcctaattcctttttcaatattagtatacagataaagtatacattatacagtccttgctttgtaaaaaacaaaaaggaagatttgtataaaaaccaaattcatcagggacaaaactcttaaaacaagaataagagcatcgtgtaaaactgaaaataagtaaagagagtactaagagattatctacaatgcaagaaaaagaactggaagtaatattgatataacaccttataacacaaagtaagcaaaaccggtgtgaaatagcatccatcgcaccaaatatattgggatcttacgggaagtaattaagataccttgctttagttaaacttggagattaccattgtctgtgacctctctgcttgtaaaaaatagaagcagaggaactttttaagcaattccaaactgccttttatttgcaatgtttgtggacgctctttagtgtcacaaaatggaggatctcacaaaattatggcaaaagacttaatttcttgtccaaccttcctttcaaagatgcaactctatcagatggacttgaagatattatagacaccaggcacagagagttcccaagcattctatgttccttcaagcaaggctttgctaccactgacaagttggcagtgcttgaagctcattggaatgaggacgaggtagccattactcttgtttcaaaaatatccgaggcagggacattcatggatgaagctcaacagaaggaacaagttttgaaggaacggttcattagattgaaggaagaaatgaaagactgtgaggccgccttatcatctctgagagagtaaaagaagaaatgcattgcagaaactatagggtacaaaaaggagcttgaaaatgtgagaaaaatggtggaagatcaaagcaaagttcggtaagaattatttgaggtcgcttataaatggtgggctctgtgtagccaatttgagcacaatcccatcgctgctagaaatccctcgagtcttcaggattttcattgtttattgcttttttaaaggaccaaatttatcatctttcggaggctactatgttattaattgtttactgaaatgaaagtcttgtgcaactactgtgctattcatgatgagtgttttgtttctggtattgtatgctgcaatattttcacgtagcttggttttctacgtttctttttccacatagagcttgaaacacctattgtattatgtcccggaaaaaaaatactcgaagcgaaaggttccgaaattgcattagtcaaggtgcaaatagctaataggagtcaatgaagcaactgagtgaaatagaaataaggcccagtatttgcattcttttaatacttatttggaataacatttttcaacaaaaataataattagttttcgttatttattttcttaagaaaattataatttttaaaaatctaaaaagaaacgtcaggagttagaaaactatgaaatgaatcttgaattccatcacattctaaacatatcatttacaaatgattagcaattttcctcgtgtttaaaacgaatatttaaaaaacaaaaagcgaggtttataaaaactaagaaggctggatttttttaaaaaaataaataaaaaatgaagaatatgttataagtttgatttcaaccgttcaataaataaaaaatgatgatgatcaaattatatttggctttgcaccaaacactattatgtatacaaaattaatagagtctggtagaagaacaagaatatcttaaaagtatggaagataaagtcgaaaggttgagtgtgtcctcctcagtgcgtcacaactcagaacttagttatatggataagaacaagaaaagaaagagtcttcaatattggacttaacttataatcttttgtataattaaactttgcaacataaaacaattagggagtttctttttgtactccttgttattctaagtatactctccatttgtctctgttaaattttattttaataatttatttatacaggtagttaaatttgacaatctgaaaattaaatttgaaaaatgaaaaaaaaaaaaaaaaaacatttaagatgtgataaaatttcaaaatgcaactgcggattttagtgttgtaagttgtaacttacaatgctttaattgatcagaaggaggtaaattgatcataataatatataatctactaatctagggagggagggagttgagagtcccttgtataactctttagtagtgtgagattctagtactttcttagattacctgagtgtatgactagcaaattccatcccctttctctgtgatttgcaatgtatttggtgatcacggtatcctcttaagattccaagttcctattttgagttcattatcaccttccttggaacaaaatgatgctctttgaatgaataaagtagagaatgacgttcgatggttaacttactacaacatgaaatttaggcttctattactacatcttttaaaaaaggaagggtgttcgtaaaaataaattagatacactttttttttctcctaaaccaaacacgtatagaaggagaacattaaaataaaaatcaacaaaataatacgcttagaaaaagtgagtacaacatgaaatttattgggcacttctgattttaacctgttatgttgttaattactcgttattgcccccaaaactaagggagcaatcaggacaagtgaatgagtcattgacaatgacgactagataacaataataaaagtagataatacaactcgtgaaaaaaaaaaaagaccaagactaaagcttttatagcatgaataagacaaaagacccaagacttggcttttttaaaactagtttcagtacccgtgcgcatacgcacgggacggctccgcttcgctccgccgtgctatgctaaaatttaatgtctacttctccacatatagcacattatacagttcatatcagctccgtaaaatatataattcacatgtttcagaaattaaaaataggagttaacatccattcaaattttttataccaacttgaaagttgcacagcaaacctatggtcatcaagcaaaaacaaaaatggagagaaaaagctttatatatatatatatatatatatatactttatattttataatgatggaatctactgtgactgcttttcatttcaatgaatggaatgtggatataatttctccttcctttcaagtttcaaatgtttgtgcttatgtagaaataggaatgtagttgatccgggaagttgacaaatgacaatataaattgtgaaatgctttatctatctttcatttacttttgtagggataaccttgacagctatacaagtgactacactgcacaagtcttggtggggtactgcgtggcatatattttcatgcagactttcatgattccagggactgtgttcatgtcattgcttgctggagcattccttggagtctttaaaggtgtggctctggttgttttcactgccacaacaggagcttcttcatgcaatttcctgtctaaacttattggacaaagttgaaattcttccaaacccaggtttgtttttaacttcccattacattggatttgatttaatctaagcatggaattaaatttctacttttatcctccaggtggctaaaagaagaaagggtttgttgaactacatgctttttctaagactgactccaaccctgtccaacacatttattaattttgcttctccaattgtggatgtgccttatcatattttctgcttggcaactgttattgggctgatacctgctacctatgtcactgtcaaggtatgtagctattgaaaaaacaaatcttatctataaattttatatgtaaaacaaattttacaataaatggagaaaaagagagaggagagagaaaagcgtaagatgtaattactaattaatgatgtgatagtgatagagagagatagaaaaaaaaaatgatatacagattgttgtacaaatagcataactcgttttttttgttttttttgcacttcgtttttgcaaattgagttgttatgctaacagcatatcaatgctcttaattggaaactgaaataaagttcacaatctagtttctactatagctttctgtaaatactccacatgttggataattttctattatcttaatgaatcatacacatttttatttcaatgtcactgtgattgtctgagtttctggttttgttatgcaggctgggttgactctgggagagttgaaattcataatcagattcatatgattaaatctatatataaaaagtgtgaaatagatatttgattaaaaaatatagatcaccttagaatccaacaacaccatctccattaaaaatgcaatttttggtcttgagaaatcagaaaccaaatgtagccaaataaatctaacaattttatacccttaaattagctgctgtagagctggaataacttgttttgcctcaagaaaatcattaggtaagatcatacatttctttttaaaaaattggaagaacgaaaagaagataggtttcttagcaaaattggaataacttgttttgcctcaagaaaatcattagctaagatcataataggcacagtgtacatatcagctaatgccacacccaccagccaccttatattgcccataccttctggatgacacggcaaccatacatttgaaggctaagtgccagatttgttggctagttctcttctctgggatgcaagtccatgctcaaaaaactgcaatataccattaaggcattaccaactatttctcaggctagattaatgaaagaaaataattaatttaaagagtaatggttaccttttgaaccacataattaccaaagacatcagtcatgaaagcaagggcatgtggcatgatttcctggtaaaccatgtttttttcttctgtagtaggtgtttcaagcttttgttgaataagtcgactcccatattgatccgcactgccaatgataataaaataatcaaatttaattcttcagtgtggcagcataaaatggacaatagcaaaaaatatacctaaattcaacatgaccagcaatttcagacagctcaaaacaataaattcatgtaaagaaaaacaataacactaccatcatgtaaagaaacttacttctgcttggctacttgcatgaagtctaactcccatggcatcatacattacctacaaaagttacagaaaatctaatcatcccactcaataatagtaaagattccttaaaacaaattatagtaccaaagataaggaagctcaacacatttgtcaaatgactccttaacagtttattctaacaatttaaggtgtgaaaaatgtcaatcaatgcacacatagattactatgtttaagagagaaaaaaaccatttttttatgagaagggacagatagcatgtcaatctacaaaacattattccaaatgttttaaagaaattagtatagaaagaggatacaatggtacaaacacgttaaaaataaagatataaataaattttatacagagtgaaatgttgtagatcgtttaatttgggacaagaattaaagacttgtatgtattttgatttggagctcatgctttgctttttctttggtttggatcttactgagttttgaatatttttttcaactgttgatagggcaagacaattgaaagggatgaggttggggggtgttcactgggtataactatggcccattaaattatatccttagatggattgaggaagtagtgacattaatttggatcaatgttaaaagcagtggcatctgggcttatgattacctatatcctcatatgcgtatctgcaaatgataatggatttcctagatgtaactgtgatgatgaggccagcttgtggactattgaaagcattctagagtgtataaaaagtatttaacagtacccccccccaaaaaaaaacaaaaaaagttaacacaattattacttaaggaagtacattaaaaacaaagaactaataacagggtatatattcttgaaaagtgaaaaaaatgtggaaataaacttgcttagatacctgcacacccttcaaagaagtcataatctcagttacacgctgttcagtcataactttccaattcacaaaacttttatgtgtctcctcttgagaaatatcaaaataaatgttcataaacttctattcaagacaacaaaccattgaattattatattattcacctccatcaaacacatttcacttttttcttgcttcttggcaatgagctcttgcatgtctctgctatgcaaattaacttattaaaactgaacatataatagtaagcatacaaaattatttatgaaatttaagtttccaagttcaatactttttcatctgggccatttcaatttgagtttcctctgatcatatttttttttctttatcactttctctttgtgtcgttaatcctttattctaattattttcattgttccaatttatgtgagataaaggtcaaaggaactcatgtttgattcagagatcaagaaaagtactatataattaaaggctaaccacaataaaaccatgggagaactcgactacagcaaattatagccaaaacatgaaactacctctcaacatttgaagaaccaatggctgaagaagcaccacctaagctgccacttaggcacactcttggcaactatattgcagcaataagtattacatcctcttgttactgccaacagttttgaaatcaatccaacacttattaaaagtgcaatggaaaaataaatgagaaagcaacaaacaatgaaaaatgtaaatataaattatatattgactaaatataaattctgccaacagtttactgttcaaagaagaaccacctaaacaaagaaatgaaccaccctcacctcaacaaactcccccaaggctgcccgtgcctgacctctcctcttccatgccgcaccagctgatggattaaattctatagcctaagaaatacaatgtggactacttataaatagaggagatacccagtactttcatttttaacacctttaggatctctatgtacctaacacatgtgtttgttcaataaaaagtttttaaatgtacataaaagaaaaccacccgaacaacagaaatgaaagcctacccttgttcaatgaaaccgtcgcctgaggtcgatgaaaccgtcgtcgttttggtcgagctcctcgatcatgccttcaactcctcgtacgtcattttggatctgagcgcggagaccatgtccttcagctccgtcatcgagatttttccctctctcttgtcgaacttgtgagagacaaagagagacaggaagtgtgtgtgtgagagagagaaagagagaaagagagaggttgagttttgaatttcaaatgagcacagccttcctcactccttgtcccaagcttttcccgcttcctcaactttttttcgtataatgaacaggtaatgaagcgtgtaggatgaaaaatttgaattcgaaaattgcgttctccatttctcatggtctgaaaagaatgatgatagcctcaacagctctctaaacttctgaatgtgataatagttggtgaagaaatgacagttgctgagagttgttgaaagctgcagagagaaggtttacaaagattgctcagcgttcatttttctttcttcagctttgtgtttcttcatttcttcattcagctctgtgtgtggacaagcttaacacgtggctgaagctgaggaagcttgttattaacatgacacgtggtgaaaatggctcaaattgcttgagggagtaacacgtcagcttctctagccttcttttattacaatagatagataacacgtatacaagcttgtgatttcgaggatcactacctcctaactctccaagagagttcaacctcacctcctctctcccttttatacattctcgccccccatcagttagttataactaattatcttttagttatactaactgtagttaatcactaaattgctatctaaaccctctgtgatatgtttcaccccacctagcactcctatcagagcatcagatacattggtcttttgcatattcagtattaactacctaaaccaaaaatagaattatgatgctatctctagttttccaattcatatgcatacaattttaaataatatataatctatggaatattttcactactaaattgaagaaagcaccttagcaacaactttgggtgggtattctcctcatagtcttgtatcaacacactgcctgactttatcctcagtgagttttggtgtagcctgaaacagtatacatcaattgctgtcatcagtttcatcagctaggattttagagtcgacaatagactataatggtatgcatcaaacaacaactatagaagtaccactatattttccatgtccaagacttgaaaactcattttttgttaattggtattcaccatcgtgtatagcataggcctcagactcagtattagctgcctgcttattatggtcaatagcaaatcagtttagtcacatacgaataagagcttaagagcttacacattgagaagataaacatatacagaaaatggcaccactgaaatgataattgaattgatataaacctctgaattacaattacatttttatggtgaggggaggagggagaaaactatgatgccgtcaaccaaagtcaccagtgacgtgactcttcaaaagacattagaaaaaacccacaaaaaagccaagaattgatgaccacatgaaccaaacatcccatgtggtctagcaagaaaaaaatttgacttcgttcttgattgtattataacaatagcacttcagtttgaattataccaatacaagtagtcagataacttcatcataatgatcctatagccacatatatcttaaacatgtattcatgcgtttgacagaactaagaactaagaagggaagggcaataataatggaataaaatatgtagacagcaaaatttaaaactatatagataaaatattgaaacttcttatcccaagtactgtcaatgtaaaaccaaaagattagaccaccacaacaggagcataccttcatcatcaccaaataaactgtgtttaagcttctcctcagcagttcgcccaactttaccacttccaacaaactcctcccccagagggctcctcctcagtatccctcctgccttttttcagccacttgaactgtttgctctccttatgaattattaaaaattattgtcaatatttatccaccaaaagccacaattaataaaaaaaattgaaacacatatacaaaaaattcaaaaccttcagacgatgaatattgatattattgtcctccagcaattcataatcatcttcatcaaggacataagccagccaaaaaggaagggcaaaagcaagccatggacattgttgaaatttaaaaaaataaaaggaagggcaaaagcaagccatggacattgttgaaatttaaaaaaataaaagacagattttaacattgcattattgaaatttagcaggtacttctgctccttcattttctttttcttttaaggaaagaaaacaatactttatcttttagaatacacataaaaaaatgataggattctgaaataccaataccatcaactgagcaaaggctaggttgtgcccagtgtctaccattcatcctgaacacccttttaggttgatcctataccatgattaccatctgcacaataatgataagaataaaaaagtttttaaatgtacataaaataaaaccacccgaacagcagaaatgaaagcttacccttgtacaatacatggttggatacatggaggagtggcaaaaaaattgcattaaaaacatgaaaaagacttctcgtgactaatactatgtctgtgtattacgtaatccagtgtgatattttttagacattgacagttacagggcagaaaagtataaatcttttcaaggcaattgtgagaatatttggagctcgtttcactatgagacgtttccacgccttgacataacccttgcacctgcaaacaccataactaagttaagacagaacctgcctgtcacattagttcagttaagaaacactaaggttattgaaagaatgaattagtaagagaaattgtgttaggctacacattagttctgttatttattgattggtttacaatcaattagaccataatctcagcagaccaaaaactattctctatcctaataatcgataattggtcattctaatttaatgaacacaaatatggatggttgactatatattctaacatttatgttagtgttctaatttacatgttaatattctaacaatgatcaattccagagcagcttttctgtataaaattaataattaatttacaatatttttctaagcaatctgacccatcacatttatacactccttggcagtaaattggtctagacattcctccaaggaagcagcatctccatgaatttcaacagtcaagtccatcatattgtcattgatttgaattcttctcacattcggtgcaaatcacctatttttttgaggaggaaaaagaagaacatgagagatggcagtgtcagcaagaatcactatgttgctataataattgccaattgagcaatgagctaaaaattatcttttaaatttgataaaggattacaaaaagtgaatctcttggccaatttgtatgatttaacttacagagactattattttccatcctgactaaaaaaacagagttctaaactattattcttagggccacttaggatggactaacttcttcagctcatgagattggaagaataaatgaaggaagcatcatctaatcatttcatgctaagttgcctacaatatcattttgtcactatgtttcattattatgcacaaaatggcacagactaaaaaggtgtccatactcaaaccagaaaacttcgattatagtctgattagtcatctaaccttagattgaaggaggccaccaaaaatgtgttggataagggttgtttcctgatgcctaggggggacaactttttctccaccaaattcatcaaggcaaacagattgcatagcaatgatagcatcaatggaaaacctgcaacaccattaaaatattggagggagaagaaacctttagtgtcataccaaaacatgacacttgtatatataaaatacaagctattcaaatacctaagatgcttgtataaaattttgtccatctataagaacaaaagaaattaatctgatgaaaaaaataagtaaccaaatattgttaaggcatttgaaagcagagggtgtttcttgatttatctcacggaatatgaaaaattgtaacacaataagtgaattaaaaaggtgaaggaaagtaatagcgaatactgaatagacatgatatatatgcttcggttttctattttcacatattgccacaataacacttttttttccaaatgatttagccatttcatgtaatctcatgaaataaaaaaagccatttatctcacaacagacatagattatatgagggaacaaaacttacgactttttcatacccatttagcattcaagccttataaaaacaaacccatttgcacactgcaggtacacgaccagagagacccagaatcgacccaaatgagcaaaaaaaaaaaagaaaaaaaaaacaaaattaatgtagttaggattaaggtaagaagagaagcatgtaccaatggtggtagcggcgcgagattgaagaactctttaccgagcgcgtggaattcgtatgtacgtgcaaggaaaggttgattctttcgatatgcaaggaacctaaaaagctaataataatgaagcagctaagtcagaaaaaaaaaaaaccacataacaaaaaagtgtgagaaaataaaaaaagaaagaaagaaaatacgcgttttgcgaggacaatactgttgtgtgttgagtctctgagtctagttcctccgtcttctccatcatttccatcgtcttttccccgctcaacaccacacaaaatcaaaattagggtttttcagaaaaaccctttttttttcttctccatcactccggccactgctccttctccagtgtacctgcaggtttcaacatcaatcagtttctaaattgaaaaagaataacaaaaatcccaaaaaatggcagtgaggcagaggacaacagtggtggtgcagtgacgaagaaacaaaagagaagagaaaaaaagagaggagaagatgaaggaagagagtccgacggaggagagggatttggtggagaaggcgatgcggaggtggtggcacaacggcggagtgggattgacggagagatggaacggagaaagaagaaaaagagagagagaatgaaggaaatttttgtgaacgaatatgaaagaagtggagcagttagcagagttggtggggaagtgaagctttggtctgaagttgaggagtggagaatccgaacctgggagaagctatgagtggagaatccgaacctgcgaagcaatgagaagcaacaaaccagctttcaccgaagctgagaagtgataccgaagctgggaaaagtgagaccgaagctgggagaagctgagccgaacctgcgaagcaaggagaagcaagaagcaggtaaggaaaatgttcttttattactgtatagatagatagatgatagaaacaaatagcactgatgattaaattagagaaatctgcttacatagagaataggcacttataagaacattgaaagtgacactgaaaacagtttcaggcagaagattcaacatggaaagcaattatcgagagacagagatagatagagatatgtctaaaaccaaggaagtaatcaaagatatacttcgagagatgcaccaaccatgaaagtctttgtccctgtctcactcttacactctccttatgcatgatgatgaattgaaatgttgctgcttcaacaaaggccaaagggcagattgatcatcaatgccacaaaacatgttgcttaaggttttttctttgaccatgtgaccaatgttttggcactgaatctctggccttgaagtagtttggaaaagatgagacactcctgttggtctagcaaaagatggtaagagggttctgctgttgctctgcagagtagatagaggactgtcaatagctgctgtacctgacatatgctgagctgtaatcgcttgtattgctgctggatcctcagtttctttgttgaggttgatggattcaattggttctttgctcttcagaggcaatatatgcagtagtagtggaagcactgaaaggttggagtatcaagtgtgtaatatcagcctaaaacaaaggcatcaatggacaatatatgataatttattcatactgactgcacaaaaaaaaatatagcagcgtatttcatgtcaactctatcgactattgagattcttcacattacctccattccttccacaagtaatatgtatgcctatgcaataaaacatcaattcagctaagtgacagacaaagaagttagtcatggatgtcaaagaagtcctctggttagaatttacagtgtttgtttttgcctcctttgagttaactttggagtttgtcagcctgcttaaacggcaaatggaaacctcagctttagccccattagcatgcttagtttctggcttcgcgagagttccattagtgcttttcttcatgccatctcctcctgctgatttggctgggaaagaaaggctcttggaaaggtttggcctgtgtgtctgagatgaagttgtggacttcaaattgagtttgtctttggtggcagatttgttgttatttgaagcaacaccacctttgccaccatgttcctaacaacgtttatatgaattagttagggtggaagatcatgtaatgtgtattctaaatgtaaatgattatcaatagtttaattgaagatacaattctgatacatcatataaggtaccttggcaagttttgagattttacttgctgcaggtttgggcccttcaacttttacaacagcttcagatacctcattcttggtctgaatttcagcattacaactgttttcagcttctttgtttatattctccttggttgtttccccaatgatgtgtttctcgtcctccatagcgactccattttcagattccattatgctataaatagtcacaaaaaataaagttgagtttagagatgattagttctacaaggtttctgaatcaagtaagtaaagacaacaaagacgaatagaaaatccaacacagtataaaaggcttctagcccaagtctaactacagttttcctgaaacatgtatggtttaattgtttttatctcagatcagactcttgacaccattaaattgcatgatgcgaatcattgggcatatgccattggatagtgaatgatgaaatcaatgaagaattgtcaaatctcttatcctcttttatgtgacatactcaattaactcaatgtagttttgcgcaaagtggtagcttgtactcttgagaatatatattatgcatatggcattgcaatccaataaaagctcacactcaaatcatagattttactaaaaaaaatccagatcatgcctatgctgtaattttggtatttcttcataaggaagccattctccgaaatgaaagtactattaaggacagatgcaaaagattaagactgatccatcttaatgtgcattctctgcaaaaatttccttccatccccttgaattttctagatacaaattctctattaacagaaattagcacaggacttgaattcattgcaaattttcaatgtttgacacaaatctagactcacatttatcaccacccctttcaagaatcaagcatgtatttactgtgctttaaaaggagctgtcatgaagaaatacaaagtttattcagtcatttgatcaaacacataacttgcaaactacaaatgagatcaacccaactaaaaaaaaacacaacatcattcagaaatgaaatcatttaccttatcaaaacaaaaattagtgtcaacgaaagttaaaggctgcgcaatagagcttaaatattgaacaaaacaaatcagagaatggagaaagagaactcaccgaaaatggtaaatgtcaagtaaaccacgagaatgggtcgctgaagaagcagagaacggagaagaaagcaacgcttcctcctttcgcggttagtttttttggaaaatactaaatcagagattaaattttgtctttggcggcaagatgatatctctaagcaaaataacttattaatgattcagagataaccaaaataacaggattatttattgctatttcttcagtccacaataaaatttctcatatcaaatgataaataaataaacacagcatctatcatagaaatattattaagtagagaggaattaccatggccaggtattagtgtgccagagtctttcactcccgcatctcgtttaatcattgattcagtgagatcaccaaaaacagacccaaggaaatttagacaaatcgatgcaataaaaggaatctagaagaccaaatttccacaaattaacataaatctagaaaaagtagagaaaaagtataagaaataaaaaaaagggactgcaaccaattaacacaaacaataaataaaaacaaaatttttaacattcacgaatccggaaatggtatcaagcttggatagagaatagagagcataagcatttagaaacctcatcgtgtccggcgaggttaatattctgcttcttgcaaaccttcgtgtctaaatcgagcagcgccggggccttcaacgcttcctaaagattgccggaagtcacacgctctctagtcgtgtggtgccgcttgctgggttctgatttctccggcaaaacaaataagagaagaagaaacaaagcaagcgtatacttaagcggaaaaatcagagagagcgtgagagagacagagacgaaatcgacggagagatggaacggagaaggaagcacagaagaaaaagagagagaatgaaaagaaaataaaaagaaatctgaggaaggagagacggagaggcgctgaggaaggaagaaaataaaaaaggaatggtagtgtggaccgtgaggtgaggaaggaagaaaataacgaagctgaggtatggtagtggaccgaagctgggagaagctgagaagtgataccgaagctaggagaggctgagcccgaagctgggagaagaggatccgaagctgcgaagcaaggagaagcaaaaaacaggtaaggaaaatgttcttttattactatatagatgaatgattagttgatcgtgtgggaatagtagtgctagcaatcgtctttgcagcagtggagcgtgagtgaggattctcttattctcttgtttctttggagattcgagcaatggaattcatctctgaaggtggtgtatatattaaaaatatggcagcaagttgtttaatttgcaatttttgcggtttctgtattctaatataataatttcctttgggagtctgcagatcatatatatgtttgtggcgtaacgcaactgtcctagattaatttcaccgtctcttgcttgtaaagtcatcgatctacacttgtttctcaccaatctctgcatataactcaattccttgaatcttctgtaagaggagaggtaagcttacgtatttttgctcatttcctatttgcatggatgacatgttcagtccaaaatccaaatcaattctccttccccccagggctactaaatctgctaattctttggtacctatagataaaataaaaacaagaacaagtggatatgaattttctatacataatacttagtttaagttttaataaaatatgtgtccattaataatgataagtttcatataaaataaaaaagaaaatgataaattaatataatataaaattataaaaatgataaactaatataaatgactgaattatatgttttataaataaaatattaataaatagtgaaacaatttatatttgctgtgtgtttttaaatatatgtttccatttatcttaaaattgttttagtcaaatgtaaaataaacataaaaatataggttcaaccctatttttacatgattttttttattgatttttactagttttggatctatttaaccggatatttattggttctcacaagtttcgcaatgatccatcttttataattaactaattagatactaactcgattctcagtcaaattgactcgtctgattttaaaaataagagcagacttttctaatatctattgattcttataaatacaaataaaataaaattgagagaaccaatatttgttttagcaatactataactggttttttcgaaaagataaaatcaaattagagaaaggtatatataaaaaaatgaccaagacttgctcttttagtataataattagcttaagtatatttttatctctgataaataagctaattttgattttgttctgtataacttttttatttaattcctatttttaatgaaatccatgttattgctctggttagatttaggcccatttaaaagcttatttgaacttatcttatgttaacatcttatgacaggtttataaaatgtttttaaatagcttataagaacaacttattcagagcctatggaaagactcatctttgaatcctgccaatgcaaaaaatataaaacatgcgtattttttattattattttgacttaaatatgtttttatctttaagatataacttttttttttacttttagtctctaatttttatttttatttttacttttcatccttgaaaatttcttttcttggatttggtccttattttgtgttatttttccccccactaatacatcagttttatttgttttagtctttgtaataatttgttttttttttaattagttccttttaaaaaattataatagaaatgtacctacatgaaataggtaactttcttccctatgtcttcttcttgagaatctctttctttcacaatataataatcaataattcgaagggtgggatatcaacaaaagatactccaacccttaagtaaggtctcgattgagagcaataaacaagtgtattaaatgagaatgaataatgtccttatcttgatattcacgtaattatttatacataacttagtaggtcgatccatggactcttacacatggttacctttataggtaatgttcctctaatcatcattaagggattaaattaatccttaattactattatttagaataaactagacattttatttccaaataagtaacaagggagcttaggtgttcgactaggtctgagtacttgactacatacagggacccctttcagacaacattgtaacgagagtaatcgggtgtttggctaagccaaacaccagggtacttatgtagagagattatcatgggtgacaagatgatgagagtactcaggagttcgacatagtcgaccacctaagtacttatgtagagagatcactttgggtgacaaggagattagcgtattttgcctagccgaacacttgaatacttatgtagagagatcaccttgggtgacaaggtgatttagagtactcgggtattcggcctaatcgaacacctgagtacttatgcagagagatcaccttgggtgaaaaggtgataagagtattcgacctaaccaaatacttgagtactttagaagagatatgctttaatgtcctaaaaatattactagggatatttatgagcattcggctcagtcagatacccatacggtataagaaattatactaataaatttcattgaaggactaggatctcatgcaatggtaaagccattgctagaaacgagcggggaactagccgaggaggggggagtaggttgggagggaggaggggaggacggtgtcggtggagtcatggaaggagggggaggtgaggaagccattaacggtggcgaagagggtggcgaaggaggaggagatggtgtagttcacgcgtttggatgtcaacagttcattcgtttggaggtctgacttgaccaattcttatgtgtatcgctgacgtgtccaactaacgaacacgtcatcacgttttagacggagactaacgatatgtatcttccacaaaacttttgaagttttagggactcaatgagaagtaattttttttcaggaatcatttacaaaattcaagtatattttaaggatctccaaaatatttaaatcttttaaatataaaacattaaaactaatcactacaactaactccataacttcttttttgtactataaaagtgatttttagacaatgtaaagttgtaaacaaaataaattatcttaaaatcatttttatctaataagtatatgttcaatatgtatatacataatttatttttataattaattataaacttactacgtaggatgttcatcttttttgttcaggttaaagaaagttgcatttagtggagcaaattgatggaatgcctttacggttttgcatcttctatttcaagagatttagtgtgtggagcaataaatcaattacgttatccttgttgttttaacagtttgattgaagagcttgagaaagaagagcgcaatttgattgtaacgaaaaatgatgtccaaaaatttgttgcacatgccaagaaacaaacgagaacgcctgctgaagttgttaaccagtggctgcaggatgctgagaatgacgtagacaatgtgaatcagttgctgaaagaggcaagaacaaaaaaaagttgttgttttgggcactctccgaattggatttggcgatactgtgtaggaaagaagttagcaaataaaactagggaccttgaaaagctcgttcaaaaaggtggaccatatattcaaattgaacgcactactacacttccttctagcacacttgatattctctcggaaaaatgtatgaattttgacagtagagaatctgcttacgagaaactaatggaagcactgaaagataatgaggttgtcatgattggattatatgggatggcgggttgtggtaaaaccacgttaggaatgaaagttgaaaagatagcaaaagcagagggtctttttgacaaagtgctttttgtgcctgtgtctagtacagtagaggttcgaaggatccaagcaaaaattgctagttcattggggtatgggtttccagaaaatgaaacgggagaaagggagagagcccaacgcttattcatgagattaaccgaagaaaataagcttctaatgattttggatgatgtgtgggagaagcttgattttggtgccatagggattcccttttttgaacaccataaaggtttgaaggttctcattaccactagatcagaagcagtttgtacttcaatggattgccaaagaaagattcacttgccaatcttaactagtgaagaagcgtgggctcttttccaggagaaagcacttataacagaaggcacccctgatactgtaaagcatttggcaagattaatttcaaatgaatgtaaagggctgcctgttgccattgcagctgttgctagcactttgaaaggcaaggctgaagtggaatggagggttgcattgggtagattaaaaagatctaagccgatgaatattgaaaaaggtttgcaagatccctacaaatgcttgcaattgagctacgataatttggatagtgaagaagccaaaacacttttcttgttgtgttctgtattccctgaagattatgaacttccaactgaaattttaacaagatgcgcaatagggttaggtgtagttggggaagttcgctcatatgaagaggcaaagagtgaagtgattgcagccacaattaagctcttgagttcttgtttattgttgcatgcatatcatggatgtgtcaaaatgcacgactttcatcgcgatgtagcccacttgatagcaaagaatgaggataagctcattaagtgcgaattggagaaggatgtaactttggagcaaaattcagtaagatatctatggtgtgtgaaatttccaaatgatttggactgttccaaccttgagtttctttgcatagaaacaaaattggaaatatcagatgaaattttcagaagaatggaaaatctcagagttatgtatcttgaaaatggaggggggcacaaactaccattgtcaacaatgacatttaaaacattgaaaaaacttcgttgtctaatccttagcaattgggaattaagtgacatctcatttataagtgatatgaagaaacttgagtgccttgcattgtctgattgttatttgccttcattccttgaattacaaaatgatggtgtagttgcacaactaaccaacttgaaatcgttaatgttatataaatgtgacatggagacgaataattttgatgtggtcagaagaatcccacggctagaagaattgagcatcattaatagacagcaagaatggaatgtttacaatgaaaacaccattaaattctttaacacctttagtgtcccccaagaactgcaatggtatacaataaaattaggaagccaatgccatgatgatgatgatgatgatgatgatgatgatgatgatgcaaattttatctcccctaaaagaactctaatgcttagctgttttcacatatcaaataaggcgattaacgatttggcaaaaacagcaaaggttatattcatagcaaatactcagggaggtgcaaaaaatataatccctggtatatttcaattggaaaaaggagatattcatgagttgaagaagctcgagatatgtaattctaaggagatagagtgtttggttgacactagcaatcatttgagtgaggtgggaattctcttctccaagttgcttaagctgaaaatatacaagatggatcaattaaaagttttatggcacggttgtatacctcctactggccctcttgagaaattagagaagctatatttaagtaattgtccacagttgacatctttcttcacgcatgctattgctcaaagtcatgttcaatccacaatcttccagaatcttcaggaagtgatagtaagtggatgtagagaattaaagtatgtcttctcagccaatactgttcgaggcctacctcaactgaaagtgttgaagataaaagattgcaatcaactagatcaactagttgaggatattgtcccatcaccacctgttacgaattatccaaattatccacttgcacaccaggatcaaaaacaagaattagataaaatcattcaatatgagcaacatcaacagtttttgaatcctcattttgaagctaatcaattggaaattttcccagaaagcacttcaattccactaggacctcttatgaaccatagctcaggtacacattccatgttgcatttcataagcatgttttcagttttaggcttttagcaaatatacatgtgttgtaatgggctgcatattcaacaaaaattgtggttagacaaaacaaagcattcaacatgaattcaattgtgacatcgtaaaaaaactcataacagtatgttgaactgttgatatgtgcatttctttttacatgaactgttgatatgatttattgcaatcattccaagttttttccttttaaatctcaatcattataagtgattattgatctaagcaatgattaaaggcagataatttttcttaaatattgccaataatcattataatttaattttatcaagtggggtttccgtaaaattttagcaaatgaataatagctctattcctcccttaagaactaaattgttgaacttaagtcaataagtgtgtttcttatattgcacttataattttatataattatttagttaaaatttataaggtatgtgtttgggtttgaagttattgacatgtacaattacaaatcacatttaaattgtgaatctattatcatatatgaaaattttaagcaatctaattgtcagaacattgcatacattatttatcaaatggtcaaagaagatttacattttcattttttaacattttagttccatataaaattattagaagataaggtcagtcataatatgaatcagcataagaatatttgtcctagaatgattttattcttcattattaacttaatttgatgcttgtgtttattgttttagtccaaaaaaaaaaaaaaaacgttttaaaaatcaaagtgtaacttgacgacataacatttatataattgattctaatatgcatggcaatgttttgcttatgagtaactgctttttcaggatcgtttactctatccagccttacaacccttgagctaatatcatgtccgaaattgggctcattgtttacggcatccacggctaaaaccttgacttcattggaagaattaattatagaagattgtgatggtttgaagcatatcctaactcgtgaaagaggtcataaaaatcaaaaggaaaacgtcgttgaggatgatcgtgaatttcagagtgatatttcaatgttcttaggtttgaaacggctatccatcgaagggtgtgatttacaacatatattatctgtctcttttgttggatgccaggcgaaattaaatagagactcataataattttgaacatcttcagcgaaaaaacattcagattggacaacaagtgcgattgaagttaaaaaagttggagttgtgcgacctacctcaaatgacatatatttgggtggcttccaagaattcacttttcctccaatatcttaaaacattagacatagaggaatgtgcaaaattggaagtaatctttccatcgtgtgttttaagatgcctaccaaaactgaagcatctagagataagagaatgcacagaattaaagcagatcatcgaagaggacgtgactgataaaaaattgtctgatcattctacacagccatgcttcccaaaactagtagatttggttgtcaaagaatgccacaagttgaaacgtttcttctctgcgtcttcatctagtgatcttctcaacctggaggttattatcatagatggagccactgaactagaggagattattggatttgaacaaggatattccaggaattcttttagcttccgaaatcttggaacattaaatataacgagatgtgcaagattggaagtaatatttcctctgtgtgttttaagatgcctatcagagttgaagcgtctagagataagacaatgcaaagaattaaagcagatcatcgaagaagataaaaaaatgttaaatcttgtttctctagaaccatgtttcccaaaactagaagtggtggttgttgaacaatgccacaagttgaaacatttattctctgcatctgcatctaatgaccttcccaacctagagcttctgatcatagatggagcgactgaactagaagaacttattggatttaaacgaggaaaaggtggtgagatagaaaaggccaaagttgagcttccaaaactgaaacttttaatatttatgcaactctcaacccttcaccaagggactgaattgctgactgtaaagcatcgcattgtccacaattgtccaaaactctctttgacttcaacgactactcttcgggagctctgtgcagatactccttattcaggtaaatgcattgcatcgctaaatgtgttcaaatacagttatttaatatgaactcttcgtctaatcatgttaatcgttgtcccttatcccattgtagtgcatatgctattgccatggtttgatgtgggcctttcctcaattggcatacaatttgcgtttcctcattccacctaaagaaaatatttatttcattcaaatttcgtgataaaaaagtgtttggtaagatttttgttttttttaaaagaaaaaatatacatttataaagcatgtaaacagacctaacacaagtagtgttaagatctgaaaatccaaaacagcacacagttaacccccaatacagtacctctaatccaaggcttatgtagaacccctacaacaacaaaaaaagatgtaaatgacattttaagcttccttacactccacccctggaaacaaccaaacacgtgtgataaaataccattatttgtttttggcgtgtttgagtaaacttttttagaaacatttttaaaagaagaaaaaaaaaagagataaatttttctataaataaatataaattcttcattaactaatttttaaaaattcactaatataatttttgtaaaaaatgagatgatatctacaaataagttaaaaaactcatttaagtttatggagaaattcattttatttttttaattttttattttaaaaatacttctagaaaaacttacatccaaacatatcatttttctcttgatttaatctctcttacattcgtcacccattacgtatcttctttctaagttctaaccacgtgcccacagcccaccatgtattctacgcaagtcccaaaaaacagcttgccacccaaacaaagtgaacaacggtttgcttcaataggatataatgtatttcttttatcataaatataagaaaaaatacatatttttcttggttttaaatataaaaaaatttaattaattttatttcatttaatgatattatttttaaaataccttttatttaattgaggttttagtttcaattaagaataagttaaaaatattaattaattaagattgatgtaattaaatataattaattaactttttttaaattagtgtgaataattttattttatttttatatttgagaccagaatagtatatgtgtgataatcatgagatgttcatatcgtgtatgtccattgcaaacatcctcgtacaatattggtgccttatgatctcatgcattgagctgcagcaaacattatacccacaccatttttggccttgtctgtcttaaacagtcacgcgtaccactttcattctaccctgcactgtatcacttcaatactaaaaaagttcgctatcttattcctgttaaccaccttgtatcaccttctccacataccttatttctaacttccaccactgttttctacctcctgaccctctctccagtagtcaattgtattgatccccgtctcaactaaaggacaccaaggcaagccttggaatttacaatccatctgaacaaagaatagttaaacactttcataaacctactccattcccaagaataatattttatgatttctaccttttcctccacctcttttgtgtcttctaggaatgtacaagaatttcggcccaaccaaattacccaaattagtgcaaaccacaccttactccacctccttaaagtactctctccatcatacagaagtcatctaaattggaaaaaaaatactcttcaccttattttgcatagtggaacattccttgactgatggatttgtttggtaagattagctcataagctatatatataagtttaataactaggcacaatcagtgaaaaaaattatgttatcaaccaataaaactcattactactatgacttttaaggtatatattattaaaaaaattaataaacttaattaacatacatgttgtttaactcaaatattctctttctctctcctgtatttaatacaaatttaagcaacttatgagtaatagttacttatataaacaacacaaaatcaaatatgtgacatatcaaaataatatttttttataagtaacctattaaacaactcccattgtggatgctcaaagtaagcttgcttaccactcaagcttgtcagaataacttataagttagtcagcgtagcttattagctgctagaatgccttacaaacacacttgtgacaatataatgatctaccatggaaagttgaagttgcatttcatttttgttactgtgtttcattgtcaaatgaagtcctttaatttataatgttttgttacagatttcaaaaacattgggctttcaccgttggactttgtccacttgttttgcaatatgattgaatcagatgaagtttctacaagtagcggcaccagtgagttgccttcatcacaggttagaaccagccaatctgtgcaagttaacctacctaaatacaatcacaatgataatggcatcaaatcggataactcatcaactacttcactaaactttgacagcaatataataatacatgtaattgcttcattacatcttgtctacatttgttatgacttaattaattggaaaaaaatcctcgttttttataatttcattatatttattaaaaaaaattacttgttgagttattctttttgtatattttgtcattgatcagattaatgaaaaatcagagaacgatttcattgggaacattcctggttcagaggtacaggctactgcaacttcaacaaattcagagctgaataaaaggccaaccccaagtcccttggatatttgtcaacgtgaaacacattcacaggtgagtataccataagctataataaatattggaagaagtgaatagcttaagactcaagcatttaattcatcacttcatgtaggagttggtggatgggcaatcaacgagtcgatcatattttacagaccaacaaaggccacttggaaaaactgaaagtaccattggaattcctcaggtaaataatgttataccaactaaataggcacattcttctgaatatttaagaaatggttaatatagactacagaaacccaatgaacaaattattcaaaaaggttatcaatcagagaaaattgtcattgattgtgtcctctaattcaaaaacaaggaccaatgcttgttccctttcaaatggcttgaggctgacatgcttattgtcatttcattttacaagaagaatgaaagtatgctacaaaattgcatatttcttgaatttctgcagaatattaagagaggtgtcaaagaaggaattgcattagaaaatgcaatgacattactaggtcaactcatttagaatcaattagctcgcagtcagggtcattagttacttctcagcataaatcatatgcacgtgcatttttttgtatggtatcaaccgttgaacatagtccaacttgtttctcatttattattttaagcatgagcagaatcccgtgccagaaaacacttctccatttcaaatgaacctagaagatccatcaacatccaaaagtaaaccacctactccacaagtcaatgataacaatcaatttgtacttggaagtatagctgaaacggtacgtgaacataagcaatttgaaagcagagcaactgtgttcgaaacaggcgagtgccctgaattagagagagaaaacaaaaggacatcaaacttacaaacactcgagcagaaattgtcacccatttcttctccaaacatgatagaggtatatgttttttctttaaatctttttaaaaactatatattagtaaactaaatatggagagaaaggaaggaattaaaatagcacaatgaaagttagcttactaatcaacatagcttttggcattgtaaagagtattgatgatatagagacaaccattattggaaaagttccaacatcagcgaaactagcaataccaacttctgttttagaggtgaaaagtccatctctgacttgtatgacaactcatcaacatataatacatttgcatgtaaatgtaataattaataggcttgaaaacatattttctaatataatagtaagactaattcttgtattgcttgttcaatatatcaaataaaagttcctggataaagaatcaaacaattaagtaggttttccagaccaacatgcactaggagaatcaatggtaaccactaaaatcgctcaaattattgtaatactagcacatgatgatgatgtacattataaaacacctgccttttcatagctataactttaaagccactcaaacgttttttttcatttgcatttgtaatgcccagaatattgaggaaataggaaaaaaaagcattcaagaggggcatccgttagagggagctacggtaaaaacgttggcaactggtgtaggaagcattagcttgggtagtggtgttgtaactctcacctactctagtagcagggacatacttgcagaagatttccaaatccaagaaataatgccatgtcaagaaatccaaatccaagaagggttgaacctgatggataaacaagagggaataggcattgtttctaataacagcattgaggtttctccaggttattgctttcttattgtctcttgtccatcctatatttatgtgtcacccactccttaaacttttagcaacttctgcagatatccgtacaagattgggagcatataagcactttgttgatctggatgatacacaagttgctctgctggaggaggcaataaaagcatatcctcatctttggaatacttgtgagatgtgtagtcagcgatttcaagctttgatgttaaaatctttggcagaaattttgttgttcctccggaatgaaactgccgttagtattactcctcagagaaaaaatgagttcgatagattatgcaatgtagctgttcaacttggatttgagaggtcatgggttgatgaaatgcgtcaacgtgttgtggcgagggatcctgagctggacaatgcacgagcaggaatccggaagcttcttaagagacgtaatcatttaactcaggaactacgcgacatacagaatgaacttaagattctcaatgactttgttgatgcccagacaaaatgtttcgactttttatgatttagaagctctagccctacgcgttggttgtgtcccacttgtggggattttctgtttcttcatacaaatacattttgcaattcttctaagaatgagactatcagtttctgagtctactgtgttctttgggacgtgtaatgctagcaatttaagtttattatgcagcattttattatgtggcaaatggatattattattgttttcgacttttgcaaacatggttatatatatatccctttatcttttaaacgtctgctagaaacagttcatatatatatatatatccctttatctttcaaacgtctgctagaaacagttcaattctttctttttcttcaagaaaccttaaaccggggtcagttcttgaattaacttgtgcaaaaaaaaaaaaaaaaacatatattttgttaaattaattctctttgaacccaatggtttttccaacttgtataattgaaactcgagaatcaaaattacacaactgcaatgtggcaagagtacatttaagccaaacctcttgcattccattcacaaaagtcaacttgtataattgatttcgacttatggaatggatttctttgatttggatgcttggagaagggaaaaatgcacggaagaatgtcattactggcagaatctggtaagacttcaattctatttattattttaccacaaacgttggagcaaaaattgtcacccatttcttccccaaacatgacagaggtatatgttttttgttttaatctttcggaaaactatatattagtaaactaaatatggagaagaaggaaggaattaaaatagccacaatgaaagttagcatgctgatcagcataactttgggcactgtaaagagtgttgatgaaatagagagaaccattattggaaatgtcccaacatctgtaaaactagcaataccaacttctattttagaggtgagaagctcatctctaacttatatgacaattctctacataatatacatttgcatacgagtttaataattaccaagcttgaaaatagatttcctaatagtaagactaattcctgccatgcttgttcagtattgcaaataaaagttggtggatgaagaatcaagcaatgaagcaggttttccagaccgacaggcacttggagaaacaatggtaaccactaaaattgcacaaattactgtcatgccagcacctgatgtaccttattaaacaactgccctttttaaagcggctcaaacatttttattcatttgtgatgcacaaaatattaaggaaataggaaaagaaagcattcagaaggggcctccatcagagggagcaacagcaaacactttgtcagctggtgtagaaagcattagcttgggcagtggtgtggcaactcacatctgagtctagcggcagcgacatactcgcacaagattttcaggttgttgaacgatgataagctgaatgaaggcaacacaggaataacactttgtaaaaacatccaaatccaagaagggtcaaacttattggataaaacaaagggaataggaattgtttctaataatagcattttattgctttgttatatgtcacctactccttaaacttttatcagcttctgcaaatactcgtacaagattgggagcacataaacactttgttgatctggatgatgcacaaattgctctgctggcggaggcaatagcagcatatcctcaacttggaatgcttgtgtgaagttcagtgagcattttcacgcatggatgttggaaactttggcagatatgttgttgttccttcgaaatgaaagtgccgttagtgttactcctcagagagaaaacgagttccataaactatgaaatgaagctgctcaacttggatttgagaggtcatgaagttgatgaaatgcgtcaacgtgttgtggcaaggaatcctggctggaccatgcacaagcacgaattggtgagcttcttaagaggcatgatcatttggctcaggaactacgcaacatacaaaatgaacttaaagagtcttgatgattttgttgatgcccaaacaaaaatgtttcgactttttgtgatttggaagttctagccctaccctttggttgagtggattttctgtttctccttagatatacattttggtgttatttgcaattcttctaagaacgagaccgtcagtttctgagtgtacaattctttttgggacgtgtaatgcgagcaatttatgtttgttatgtagcattttctgtggaaattattatcgtttttggacttgtgcaaatcatggttagataaatattttgtccctttatctttatacatttgctgaaaacagttcaattttcatttactttaagaaacattaaaccaggtcagttcttgaattacctttactttgatgtgccaataaacatatatattttgttgaattaattatctttgaacccaattgtttttccagctttaagataatattttaagccaaatgctatcttccagcgctcttaggaggccttcctcaatcaaaagagctgaagatagaaaattgccatcagctataagtctacaacacatcattggataaggaacgtcaaaacaagtccaaaattgagtttcctgtttaggaaaaagttgccaaatatgatcggcatttgctcagaaaattattttgcaacatgctcatccttacaactgcttgttataaacgatgctgggttgtctactctgtctatcaataatttaacggttgatttagaagctacccattcggatcattagttctaaaacgttatgactttatctgttttataagcatgacaataattctatttagtcacttctcttaaaatgtgaaatgtttaatatttgtataagatttcataattaatatgcttttacaggattcaatggcaacgattatgactattaagcaaaatttagtatctgttattattgagaacacctctaaaatcaaagaaattttctatcttgagggatttccaatcaatggccaacaagtgagtacgtggttagaacttagaagtcctcactactaaggttaatcaatttaccagagccttcatgttcaacatcttcataaactacacatatgcaattgtccaaaactaaaggctatctttctccgcatctctgtcttgagaatgctacctctgttaaaggtcctagtggtagaacattgagaggaactggagcaaatcattaaggacgataaagaaaatgaaaatatctcaaattctaaatcccaaacagtttaaattccatcttgtcacactctgcaacaacttggagtatctgttgtttatccccatttccccgtccttccagaattagagcatctgatcctaaatcaaaattctcgtccagtgcatgcaagtgtttgagggtgaagcaggtatgagtagaggttttgcttccaaaactgaaacatgtagtctcaacacaacagccaaacctcgttaatttctgtcaagggatagtttcagaacgtgattaattttcttgtgcacaattgtccaaagttatcactaacttcaacgactactatcgaggacatcggcaaacctctaattctggtaagcatgttatattgtatcatactatcgaggatgctaggaagtttattttttagttgatgatctatgaaacttgtaatttaaatccgtcgaaacatgcaccaagacacatacattaccactaaaaaaggatattcacccatccagaaacatgcaccaacccaaacaaactaatgctttaaaaagagaggagttacattgaattctagatcctttcataaactagctgacacctttcactttagaagtttaaccatcaaattgctagagatttatacatgaaaatagatatgacctccatgttttaaccgttaataaatatatttttattgggtattagttcttttatttttatgatgatttagccttcttaaaattcataactctggaaaaattcagaatcataaagttctactatcattcattccatcacagacagaaataacagtgaagaaaaaacaatggaaaataaaacccaatttttagattctctattaatgttaatagttctaaaatgaagttattactcttgacattgtacaaaacagcgcaacaaaatgatgagaaagtttcaagagggggttcttgggaggggtagccggcttggtaaaccaagtggtgtagagaaactgtttgtgtgcttcaacgtggttgcaaaaagctcctctacaatctaaacatgcaaaatttggtcaaaatcaagattgatcaaccttaccataatctacgataattttagaagctatccaaacacacattaataggtatgtgagttgtgagtgaagaacacagacagaaacaatggaaaataaggcaaaacatttagattctctctattgaataacggttctaagatgaaattattactcttgacaagacatggtacaaaacagcagcaaccaactgatgattaagtttcaactttcaagagggattcttgggaggggtaaccggcttggtaaaccaagtggtgtagagaaactgtttgtgtgctccaacgtggttgcaaacgagccgaaccttctgcctctctctcatccatttcagcactattttcatgtgattcttgcttgtcaaatctttcaatccaacttcctaaaacccgatcaagtttatatctattttcagcaccattgaagagaatgtgagagagaagctaagaaggtactagtacctggacacgttcccaggtgttagcaacagtgatgggaccatgctccttaattatatcgaagagggttcttgtgattgtctgcctctgctccggcggcgttttcaggatcacgggtcccatcttcggcttcggtttcttcgccaaacatcgaatcgccgtcccaaacattctactctgcaaaacacatttctatgaatcaatcaacacattttctaaggaacgaaacagaaatagcatggatttcgaaacgaggcaatgcctgcgaaaccgaatcgaatttcccccaacaaacaatgaagactgagagaagatgatagtggaagaaatttagggtgaactgaactgaaccaacatggtaggacttgagttcagacttcaatagtgggccggctcagctgggcttgggcctacgccactgttgaaacatcgccattttcttattgggcttgggtcatgatattagcagcttgattcctatgtgttttgtttttcaaatggagtgttactacactacaccataagtatgaatatatgttttttaaaaaaataactttcaaaaggatatattttaacaaatttatatttggtaaaattcgttgatatttgcttaacatgtccacgtgcgaacacaaaataaatatgaggcaaattttcatctaacaaaacagggaattaatacatgagtccacgttgtcgtatgtcatttttgggattatgtgtatatttatgcaattgtgtggcttccaatttaaaaccaggtcagagtatatgtagataagtaaattcccaaaattaacattgtgtttgatagaaaggtaagaaaataaatgaaagtgtaaaaataaaaaaataaaaaaataaaacttttaattaaaggcatataatcgatatctatttggcataatcgactgtatgtcaaatccaaaatcaatcactcgttggcccaccatatgagttctacgagggcccttgaaagggttatttgtcaaagtaaaataataataatgactttttagtgtgtttttcatctcattttgagatgcattttcttgtatgtggggctcatgagtctttttttttttttaaatatttactttcatctttaataaaacaaatatgtgatttgtcttttattatttttcacattcacaccttttactttcataggaaacaaacaaagtgttaagtgaccgaagaggatattggtaattagaaattgtcaaatcttctttctccacggtcatgattcccaaaactagcaccaacactaatcatataaccatgccacaatttgtaacctttgatctctcactctgcatataaaacttacgattattaatggagcctccaagttgaagaaattttttgaaaactaacaaggtgatgaaatagaaaaggaagttgagtttccaaaattgaaactcttatatttatacaactagcaagcctttccaagcgactcaatgacatgctataaaacatttcattgtccgcatttgtctcaaactatcattacttcaactgcaacaacctattatgagttccttcgaatcatttcctgattcctttggtggtaaatactatacacactttgctttataaggtacgatatatggaggttcaaccaatataaaattccgcggatgatatcgctaatggattctttttcttttttatttctcctcatttcaaatatattttggtttgttatttgcggtgcttctaaaaatattgattgtctcttgggctatttgcacaagtaaagctatttagttgttggccaagaagaaagctagccggtttaaattgatattttataggcttaaatatgttatcatacctgaaaaatagattgttttcaatttactatttaaaatttatttttgatcatctatgtatttaattttttttttatgtttcaatgtaatactagatgttagtctcattatgttaagtgatgatgtgacagataaaatgtcagtcatcaaacataatcactaacatattagtgtcatatcatttattattatttaaaaaattcaattatccttcttctccttcttccttcacctcccctcaccccaacttcggttgcatcatcgtctccctctctagcaaagtcgtcggcgagggctacctctatgcccagggcacagtcgtcgcagagatccagcccgtcaacattgtcgacgaactctgccgcagcgccactggtacctcaacatggagcccaacgattgccacgacaaccacaacgccatctctgctctactccaagttcttcttctgtttgtcaccaaacccacatgtgtgtgttacaattatgatgttgttgttgtttctcacgaatacaatgtttgttgttggggctttagtttgtgttttgtagttgataaatgatcctaccctttgtgaaaccaaactagggaggggtcaaaagggttgtgattggaatgaagcatcccttgcaacatcttcatggcaatgcagtggtggcgcgaggttggatggcacggggttgttttccgttggagaaggagaagtcccatttgttttaattgaatttttaaaataaattaaataataaataatgacatggtttcaatttggctatgtgttaagtgtaatatgtgttaagtgtaatagcttcatgaaatgacactttatctgttatgttatcatttaacaaaacgagattaaagacatatattccattgaaagataaaaaaattccaggtacatatatgaccaaaaatgaattttaggtagtaattaaaaaaaactattttcaggtataaaaaatatatttaagcctatttcatatatactgcttttcaatggcagttatagtgttggtttggattttcacttagaaactcatagtagatacatgtgatgtcttctatgtcttaatcaatttgtacaatgttaaaaaaacttttccacacacaacaacaattatccatacacttaagagatcttagataaacaagatggtaagatttttatttttaatatacaaagttaaataacaatataaaatttaaatattatcatcatcgtaatctttaaaaataagaaaattcttaaaataagttaaaacaaattaattaaatatttaaatctaaataaaattgcaaagattttaaacataatatttttttttttaaaaaaagatctccttgaattttggggcagcatgcaaaatcgattatatggacaatatctttggttagctaaacattcaccaaagaatcatcgacatttgatctttatctttttaattaagaaaggcatatgtgacatgtatttgttgtcattttctttatctttaattttgcacaaaaaacatttcttcatgcgtcgaaaccacattatgagactcatcaacaacacctcaattctcacagaaacactttcctgcttagcacttcgcaatgaaaattttcaatcttgataataatacaacccatgcacccaacccatgcacacggctatcgtcctcctgtaaagaaaatagttaagttagttaatttaattaataatgtcataaattttaatttcatttcacaaatactcatagaattaaatgatttaaatagtaattatatttaatgacattatatgtaatttaaaaataatttttaatcaaaaataattacataaaaagtccatacatgaatatctcattaatatattttgtaataagttaaagttacaaaaatatatcaagtcccttgttattataaagatttaagactagtttgtctctctatctcttcctcatattcacttccattttaataccctcctcttgtgaaatgatgaactttactatcttaaaatgcatatgatatatctttctatgttttaaaattttaatatcaattgaatagtttaacactttaaaactgagaaatcaatttcaaatatgtatattcagtgcccagaattcagaaatgctcctaaaaatgcatttatataccatcttatacttttgatattaattgaacggtttaatttaacttattatctcattcaatctatcatctttaatatttatagttctaacttgaatttaaatattttactaaaagaatttattaataattaaaataataatatacacagaaaaaattatttatcataaatttaaaataaaatttatatgttaaaaaattaatatattatatattttaattataataaatttatacgctaaaaaaatatttatttattataaattataaattttaattaatatgtaagctaaaatactactagtaattaattaattaacaatcaatacatttgaaaataaatctatatttcttataaccagaaaaaataatatatattgtttagaagtactagtattgtcttactgcatttgtttaatgacacttaactatgtctagagacttatttgcaaaatttatttaggtagttaaacatcaaagtcatgattcagccacaaaattacattattaatcaataatgttacacaaaatttagaggaaataatgtacttattatttattttcgagtagcaagtggcaaggctggcgcgtggcttgtgatgcaacggagtcgcgtggtgcgtggcagatgcgttaacacgaagcatgcaattctgagttgaaaaaaaagccttctccctctcttgtttcctgtcttaacatctcttctcacatcacttactttctctctcctctccatgtcttcttcttcacatcaaacgtagaatatctttttctttttccctttttttaatcttaacccaatttttactgtcgcaaagtggtaagcatatttagtttatactatttttttgatttgttatttctcctttaattcaataaatgagtccttgagatcttgtaattggggcttccattttagcgggttgtccaatcttctccttgtcagatcgaccctttatcgtttacttaactgggaaaagtttcttacggattttttcgagaaaaactgttttttttttggtgggggattttacttatttgtttggtctctgttcaggtgtatttgaggaagtttgatttgggaaatgaacaaaggacagtcaccggagcctcttgatttcttcatctggactgttgaggttaatcatttcattccctttgtcaattgatgtatttattttttaatttttatttacattttctcataataaaaaaccacgccttgtgagttgtgatccctttttacgtgatttgtacttttaacatgtaattaggttttttgcaacagttagtttaactaaatttgttgggtacataacttgaactttgtccacgatagtctgttttgtgatattcgtttgcttctctgataacacaagtaaagactgagattaaacctgttcttatatgttggaaagttgaacatagtattgtctaatcaagtgggaaatttggtggatgatgttgaagtccttctcaacttggaagtaattggctaatcaaacttgtgcgtgaattatttcatttaattgtgaatctcatctcctccctgttgttttcacaagttatctggtttttaaattaagtttccaattcttgccagataactttgttcaattcttcagtttgacactcacagtttctatgatcattttaaagtgagggcttttacattattctctcaaagaaaataatagattacactgaatgcttacttactcctttgtacagcacaaacataagtgtaaatcttcgtttgatgagtttccactgcaaagctatatgcatctttctgtgatcattggattttcaaacactgttgttgcaactatgttttggaaaaatagcatctgaaactagattgccaatatattatttgtcttgattatgcccttagtccctgttcctctgtcagtgatgtggcgagcttatgatttatccttgttgtcagttactctgttaagtaggttattaaggtcatgtatctgaagtgtaaactattacagataaagaggtatcatcttgttattctcctttgatgtgtgtgtcaaggtcacaagattgcggtatgattctactcatgtattgtgtatgtttctacttatgtattgagtgttcaataatgcttattcagcactgttatacaggtctagactctacagtataattgatgcactgttattaattactgatataacgtagtaagctctggaatgcttccacatattttcttttaattcatttatgctgctgtttctgtatgatgaattgtgcaaattacataagacctatgttgacaaggatctaagcttgttgtataaacccttttggatttgcttcttcttcttggtgtatataacatgtgagtgctgttacacagacatatcatatagtgcgtctccatctagggaagggttgtacacaatccagccagcttttggtagtttaattcatgccctactcatgtattaagctaccataggtctggtttctttatgcctggattgttttctacttccttcttgtaatgttttatcctttatatatatatatatatatacatatacatatttttgctgataaaaaaaaaaataaaaaaaatatagtgcatctccatggcagaatcaaaatgtaactgataatttaaactaacagttgcattcttgcttatcttgcgtgttttatcaggatgttggattgtggctggagactataaatcttggtagttacagccaaatttttaaagaaaatggtgttaatggagaatacctggaaggcatgtccatgtttacgactgaacagatcctacgttttataagacgttgccacatgaagtggggagacttcatcacattgtgcaaggaattaagacggattaaaggtctctctctctctctctatccttccccctttaaacagtaaacagaaaaacacttgtcaataaactcatttgaaattttcatctttacctatctgttttgtgctctttccatggttaggtaaggcatgatcattgatgttgtcacaatcagtttcgtactatttgaacaatctataaggaaacatgaatgtactagaagaaagattagagtagacgtttagtattactgtattagagtgagataacttgcctataagttgttggtactgctgtcatttcattacagacaaccattaaagggtctcatcatagcacatatttttctatattgtgcattatcaagacaatttgtgaattacattttctaaaaatcgcttccttatatatatgtttttagacactaaaaattttgtgattttccaatttgatttcccatttttttttcttttcaaattaatgttctcataagacatttttctttacctgatgaaaaaatatcactaggttgtgcagttttcctttcttatttgattcctggagatatcaggagtttctataaatgtaaagaattttctatttggtctctcatttagagggaccagatgaaaattttgtaatgtatttaagaaggttcaaatgggaaaaataaaaaagagttaaattaatatgcattgttaggataaattcatattgtatgcgtatgtaaaatcgttttacatggacaataaatatataaatcaaactcaacaaagaaatcatttggtaacaaacatgccctatggaggactcatttggaaaaataataaaaatgagaatcaaatgtgaaatttgtgaatttttaaaaggaccaaaaacttaatcaaaccctatattattatataggctggagtcatccagaacttgattgtcaagacgtccattcctaaacatgtgatatgtttatatataaggagacatcaaaatatgcatatgctgcttctgtttgttgtgttgtgacttttcttgcaagatgatatttcttgtgacaacaacataaaaaagaagggggggagggaggggggtgtttacccccggtaaagttgaaaaaaatggctttatctgttaatactcctaacttgtgaatgctatattgatgtctgtagtggcttgtctgaaaggggagcagaaggtgcggcggccatggtgggcaccggcttgcctatctacagtgttcttaaaggttgcaaaatccaacagacaatcaagagttgtttccttgaagctggaaccatgataatacaataagttaaacctctgcatgtgtaccagtgtacgtatagcaaatttctttttgcctagaaaacaaaagataggaaagaactttttctagcccccctttttttattttattttattttattttgcttttgattccaaaacctggttgtttcttctcctctggagaactgaactgttatgcagtagaaggtccttgtgcactaatttccggtgctgtgtaattatgtattctcttatatgtgaacgaaaatacgatatatgccgtttctcttcaagttccaatacccgttatctttattcttctaatcatttgttcataaatttgtcatcttgaaaatgaaattttgagctatgatatcaaatgacgagcttattatatgtactgcataaatacatttttttataatttagttttttttttttttttcattttttgtgtgcaatttttttcgtcctattttaaattattttaaataatattttttattgttcaaagaactattttttactgtttaaagttttagatattttaagggcaaaaaaaaaaaaaatacagaaaaactaaaacgtaaaaaaaaaaaaaaaaattcaagattatcaaagtatttacctttcattagtgagtagtgactggccactacggcaggcactgcctcatgctcatacgcttcattatcctcgcttatacatggctgcttgaaccgtaacccagcgtcagacgaaattggcttcctttatttatttcatcccttcgcgtttgttagttctttgggttacaacaaacggtttcgcattgaatgcagagacttttataaaaaacggtcatggctattcaaaaataaataaattacatataataattttttaatagtaattgcttttagggtaatgaataccacaatagcaaatacacaaaattaggacccctttcaacaattgtagttttttttttttttttttttaaaagtcgacaattgtagttctagtcatgacaaatgctaataagtaataatgcgcttctttaacactttttttattagttgaaatttgctataatttataaatttttgtagatttttttttttatttactaagtttcactcataattttataaataaactttaactaataatcaagagtttataagaataagtgagttagaaccgtcatttatattcatattttttatgagtgtaatttatattcatatatgcaatgcaacacccacagaaaatgtaagttttatgcatacaaattgacaagtaatttttgcttatatggttaaaattaagtcatatataaccttttaactagagaatatattttccgtatgaatgatatcaacactataatgtgtgcttatacttattttaaatatgaaactgataagataatcatatattttataaattatttttcatctaacctgtctttttattgtctttgaataattttattctaagagatattttagcatctttataatttcaaatttacatgaacacaagtgcctaaagagaaagaattcccccttaacaaaaaaatgaagacgttatgagtgaaaattttattacacaaaaagtaaaacccgatatttggttccttcattttcttcattttccctctcgtgattcaaatggcgaaaaccccataaaccctaaaatctgccggtactgagtgatcatcatcatcatgttttcttgcggaacgaagaagagcaatgttcgctctcgcagagagcaaggtcgcgattccacggtggtagattctccggtcactcctgctcgaacctctttccacgataacgccgttcccaatcgcccgaccaccggcactcccgctccctgggttcctcgcttatctgttcttgccaggtattcattcattcatttcactttttcaccaaaatctgcatcgattcgctttctgcttctaactgttatccgttttcattgcgtagggttcctcagatcaacagaagtggaaaaggcgacgatacagatcctaccaaacctgttttcgtcggcgagtttccgcaagtggttcgtgatgagcagaacattttgctacacaagcgaattcctggtgagaactgtttgatttgtctctcaattgtgttagttagcacgtgtgttaatcccttcacatttgaagtaaattaagcttgatgtgtttgagattatgatgtaacgcaatgcagctgaagatcacgcgtgtggcgggattgacaagagcacatcccttgcttggattatttgtgggaacagggtctacctgtggagttatttgtcccctgcttcctccatgaaatgtgttgtcctcgagattcctttgaatgatgctgatgttggcagaaatgatgctggtagttggttgcttcgtgttgttaattgtgacgccatgcctgtgggaacgaataaagttgctaaacagtgcaactctgctgctgtggttttgtgcaattgtcggactcaggctgttatgtactggccggacatctattctcagtcacacgctccagtcactagtcttgtgtcttccgatgagctggaggctgttatgactcctgatgggaaagcatccttcgacaggcagcggcgacaaagtaagctgggaagtagtttgagtggattgcacacatttaactctatgattgcttctgctgatcccagttgtaagtttgtatgtgttgcccttgtgtgtagctcgagtggtgaactttggcagtttcaatgcactcctactggcattcatagaaggaaagtatatcaaaatttccggctccaacagggtgaatcaggtcaaattgtgagcaatattgggtaccctaggtctctgacgtggtgttttccacatcattctattcaggaatcaaattcgcaattcttggtattgacagaccatgagatacagtgtttcagagtagagtttggttctgatatacctatttctaggctttggtctcaggcaattgttggaacagatgctgaggttggcattaagaaggatctagctggtcaaaagagaatctggcctcttgatatgcaagtagatgatcatggtaaagtcattaccattcttgttgcaaccttttgcaatgaccggattagcagttcaagctacatgcagtactctctcttgaccatgcaatataaatcagggttgggtttagagacaacaaatgacagggttttggagaaaaaagcccctattgaggtgataatgccaaaagctagagttgaagacgaagacttcttgttttccatgaggcttcggatagggggcaagccttcaggatctgcagtcataatatctggggatggaacagcaactgtctcccattattatagaaactctacacaactctatcagtttgatttaccttatgatgctgggaaagtgctagatgcttctatccttccttctgcagatgattatgaagaaggtgcatgggttgtattaacagagaaagcaggaatatgggcaataccagagaaagctgttatacttggaggagtggaaccacctgagagaagcttatctcgtaaaggcagttcaaatgaaagatctgcacaaaaagatataagaaatcttacatttgcaggtaattttgctcctagaagggctagctctgaagcatggagtgctggagacaaacagaggacggttttgagtgggattgcacgtcgaactgctctagatgaagaatcagaagctttattgaataatctattcaatgattttttatcatctggccaaattgataggtctcttgaaaagcttgaaacatctggttcatttgaaagggatggggaaaccaatgtttttgttcggatgagcaaatcaatcatagacaccttagctaaacattggacaacaaccagaggagcagagattttggccatggctgttgtttcaacccaactcttagaaaagcagcagaaacatcaaaagttccttcactttcttgccttatccaaatgccacgaggagctatgttctaagcagagtatgaaatttttagtctattcaccaaaagattatttgttttgatttgatcttcaaacaatttcttttacaatacttccatatgcaactcacttgtttgattatgtttaacttggtcattagtttttacattatttgggtatgtgatgtctgtataagcttaatttatctaccagcctgtttttataaaataaaatgaatcagatataatcatactttttaggatgatctcatacaaagtatatcacaagcaaaaatggagagtggtttttcactgatagcttattgacttttataaattgggtaaaatgaatatgaatataatctcaattatcatccatctgctcctttgcctcagcatgtatgaaaaaatcaaaggaaggaggtttattctgcgactaaatgaattgaggcttaattatcttatttcttccccatagcctcacatagagttttaaaaataatgtaagcttaattaggtaaggaaggagtgaatgaaatcctaaagcacatggattcttaattcttgatgtcatttgacttgttagggtgggattataagtgaaggcatgtttgatttatgattttgttaatggtcatgttttcccagccaatttttttaattgattaaatagattaaggttgtgaaataaataattatagtttcaggtaaaaatgcaagttaaaacaacacttagggaacagcaaatggacattccattactaaatgatgtttttttcaattcccaggacatgccttacaaattattttggagcatggtgaaaagttatctgcaatgattcagctgagggaactgcaaaatctgattagccaaaatcgatcaactaatgttgactcctcaaattctagtttgaatattcagatgtcaggtgccctttgggacattatacaattagttggtgagagagctcgtcggaatactgtccttttgatggatagagataatgctgaagtgttctacagtaaggtttcagatcttgaagatctcttttactgcttagatgcagagttagaatatgttataagaccagagcatccgttaggaatccagatccagagggcatgtgaactctctactgcatgtgttaccataattaggacatgcttcaactataagaatgagaaccgattatggtatccaccacctgaaggtttaacaccttggtattgtcaacctgttgtacggactggtatttggagtgttgcttctgtcctgcttcacttgttaaatgaaatatctggacttgataaaacagcaaaattagatctgtataatcatttagaagccctagctgaagttctacttgaggcatattctggtgctgttacagctaaaaatgagtgcggagaagaacacaaaggtctgttaaatgaatattgggagaggcgagatagccttcttgaatctctctaccaaaaagttaaagaatttgaagatactcacaaggttattattctatcttgcttaccgtatccttgcaatcctggtgtgggatagatatacattgttcaattggtcttttgtgcaggatttgattgaaggagctggagagcagaatgaagaggacataatgaaggttacttcacatctgttatcaattgctaaacgacatggatgctacaaagttatgtggacaatttgttgtgatgtgaatgactcggaattactgagaaatattatggtatgactatgattttattcttcattgtgcactgatgttgcttttattcccttttttctaggcatttgcaaattgcaatgatgattttcttagcttatcaacccaaatattctgttactgataaggctttaggattgagtagaagtctgctgagaaaaaataattgcactcctaaaacttaagtccataaggaagcaatagtagcagttacatccggacctagagctagagctaggacacaaaatgccccttaaatgaataaagatctattaattaagaaccaacaacaacctcacagtactaccaaatttgtagagctccacatattctttctttcaatttaagcctttatatattattggaaagagcttccaaagaaagattgtgcaaacaaatgttaaccaggtatacgaattttttttgaccatgttcttcaccatcgcacaagcacaatgcaacaccaattatttttatgaactttcagagcacaagacatacccataaaagtgtcttattttggacacggtacctgaaatgagttactagtaatagtctaaataagttatttacaattacatcgctgacacctcccaatgttgaataaaacctcggcctttcacacaaaattggttatcggaaaatgataatttatgatttctatttggtattatttaatcacaaggattctagatgtactatgtgttgccatttttttttttaaaatgtattcttgcttatgtctcaattgtttgtgtgcagcatgaaagcctgggacctaatgggggatttagttactatgtctttaagaaactccatgaaagaagacaattttctcaacttttaaggctaggggaagaatttccagaagagctatccattttcctaagggagcatcccgatcttctttggcttcatgatttgttccttcatcaattttcctctgcttcagaaacacttcatgcattggctctctcacaaaacatgcaatctacttcagttgctgaagaggaaggagaacaggagtatatgaaaatgaaactaaaattgactgacagaaaaaatcttttatttctctctaagattgctgcctttgcaggtatggcaccatgtgtttttccatgtgttatggagactacttcctttctcttcattctatttaatatttctttagatgtcttcctccttctaactagggagaatttgaactcaatggccgggactctactttaagttttctgctatctctgataatatgctggattcttggttatatgatatatcagttaccaactcaacctaatggctgcagctttttgtcgcctttttacttattgttgcgaattggtgaatatctagattcttagaaatctttaatctgtgttagaatatattaaaaatctctaataatatcttgaatatatctttgaatagtttggagtatcttaggattacttcccatttttcattattatctcatgttttatttccatatttacatgtgaccaagcattatatcttgtccacattcggttgtggtattcaagtcattggataaagattggtgtttatattctgatttctttctctctctctctctctctctctctctcttatctatatgtactgtttcaactggacacaggtttagttagttaaatatctaatttttctttgaatgaatagatacctaataaatttcatttgcaataaataaaaagtattacgtttttttgttcaacagctggtaaagatgctggtactcaagtcaaggtggaccgcattgaggctgatttgaagattctaaaattacaggtaaatttgagtttttatttttgaacaattgataatttgaagagggagttgatttattttctcaatcattcatcgtgagtattaggcatccgtgaaactctaggacatcagccagtgtttgaaagctaacttgatatgttaggagcaaacagatgctgttgttactaaaaatatttgaatttttatttggcttatatatgaacttagtccgttcgcatctttttaattttggtccatgtaattttttttttcatttttagtccctgtcaatttgcacttttccaattttagtccctttaagattctgtttttagtccttttaaatttgtgctctaagggaataaaattggaaagcacaaacttacaaagactaaaaatgaacaaaaaaacttacatgaaccaaaattgaaaagtgcaatcttaaggaactaaaaaggaaaaaaaaaaaacttacaaggacaaaattgaaaaagttcgaacttacagggactaaatttgtatataagcttttttaatttctagtcatataatgatataaatacaacaacgacaacaaattttatctcactaggtgaggtcaactatagatcacatctcacatgatgctattctgcttgattagaaaccaaattctctagggttctatttatgatgagatccttttttgtaatttcctccattgtccttcttgaatttcctctaagtgtttctagtgactttctttgaaagtgtccaaattactttaaccaattttctgtgttcttttccttgataggtatcacaccaatatcttttcatctacactcattccatatcctgtcctttcctgtatagtcactaatctatcttgaactcattttggttactcccacctttttctcttatgatcttaccccttttaagacccagtgttatcaatggtggcttctattgaccagctaaaaatctgccgaaaaaatatggttgatggtgttgtggcatatggctgaaccatggcggccaccatagcctgccacaaaaacccaccatgcctctgccatagaatggtggcctgtcagaaatctaacctgtaatctaccatggtgctgccatgaccgctttttaacaacgatgtaaagaccaacattataaagtataattaatagttaattatattgaagcaagataaaaacttctctttgaactgggtagattttgtgatcacaaataactttcaataacatgagacaaatataattgcatgataagtttatactttatataatattataactatgtttaaatttcctctttaaaataagttgttaaatacacgattgaggggtttgatgtgacagttgttgtaggaagttaaattattcatgaaattgaagaggaattataaaaagttttagttttggagggagggaaaataaggagcctgctgaaggatttggcatgctattaaattgtaaagaatacacgtttgacaatcaaattgactgacttgtggcattgagtgttatgtgactgtatgacaataaaattaatagtttaatatttgctttgtttcatgagaacttgtttaaccttgcgctggcaaataagctttgttgcacccttttaggagtcctctttaccctttcttatttagatgctttacctgcaggaggaattaatgaaacgtcatccttccattgaagatagacaacttgttgaagctcagctgcttcatccagaagacttgattaaattgtgcctggaaggtgaagatcgagaactctcattgtcggcctttgatgtgtttgcatggactagttcctcatttcggaagatccacagaaaacttttggaggattgttggaagaaagctgctagtcaggacgattggagtaaattccatgattcgtacagaactgaaggttggagtgaccaggaaatcctgcaaaacttgaaaaatactatacttttccaggctacaagtaggtgttatggacctcaaagcgaaacatttgaagaagggtttgaccaagttttgtccttgagacaagaaaacatggagacttctattttgggggatatgggtagttcagtcgaaacaatcttgatgcaacacaaggattttccagttgcaggcaaacttatgctaatggcaatcatgcttggtagcgagcattgtggtgacatcagacttgaagcagggccttccccaatggaataacttggccaaggatcattccttaaccgtaatccaagttggtgtaggtttagtacatgacatgtggaatatgcagttgtttttgttcgctcctctcttccatgcattgcattcacaatcacaacgtaatcctggatgatattggtaaatggtgttggatagaagatatgcagcaagtacaaatccgcaaatattaaaagagatgcttcctgtatacgattttagcacaccattccggaaaccctgtttggtaaaagaaaaaggttgtgattaatattttttatatatataaaaaatacaaaacaaaagcgtgtcagaatggcgcaattaaaatgccttgcaaataacattgttgatattgaaatcgcaattaattacaccatgtcagtataaataacatcaaatactaatcctgtaaacaaaaaacataaaaaaaaaactaatgtttagtctgcaaatagacgttgataaagttttgttaagagaatatgaaataggatggtgttttatcattacaatgaaaacatattaactgaaaatgaaaacgagtatttcaaaatgtgcaggtgtctatttcaaaattggaaataagtaataacttatcatctaaatgatggattacttataaatcttctattcttagacaacaatgaaatgacctagttttatttatttttttaattttaataaatgcacctcgttcgtgcataaacaatttgtacccctcttatagtaatttttatagaggaacagacgtatattatttcattcataatggagtttggtagaagacataagagctagcatacaaattagatgttcttgcaagacaatgagccacaaaattgttggcctctttacaaaactccctaatgagttgttaaagaaattaaaaagatccctacaattaatgatgaggacaattaagttcaaggaccaacagaaggactagaagaacgtatgatcagagccagaaaggcagaggagatcctacaacaagtggtaacaataatttttgaagttgtacatgggttgaagaacattgaatcaaaattatttcagtgcatgattattattaaagactcatgagatggagggtgttgttgactctttttttagaattaaataaagttatacttcttttatttttcgtttttttatttattttagtagttgatagccttgatgtcttttcatgtgcaccactagaaattaaagccttcataattgacgttaatggtgcgcatttagaataattaaaggttgattgcctatatgtacacaaaattgcaatagaatggacaaacttgaatttccagacaattaattatgtattatgagaatgttatttaggtttcatgctgaacccgtttagactcattaggggttgcccatcacccttgtggcatcttcctttggcttatcttccattgttggagtgacgccttccacctgtcatcaaacgatctgtaattagaactgtgtcacttactgagaattgaagctaaatatgataaacctttgttgttattgttgaaaccatcaaccacaagcctgttgcccaacacaaaaattattgttgttgttgctctcctttaaccattccctggcttggtatgagccgaatgcttcaactactattgggtctggaacaccttgaaaccatgttgtttttgcttgaataaattgcccattgtgatctctaaaacacattccattcccaaactgttgatcttgattgaaaattgttgcatcaatgttacacttcaagtatccaaaagatggtttcttccactcacattgattgtttaaaatctgcattacatgtgactgggattgctgctgtcttgcatgcttccattcttcaagttgttgaaatgcttgttgaatcgtgatctatgttggctggacctgattcctccaaattttatcatttcgttgcttccaaatacgccatagtgcagtagcaaattttttgcatgggtccttttcatgtagaaagttgatgatgtcaaaaatgagagggacaataccttctacagacaaaactttgctctgaataatgggccaaagttttgcttcttgccaagttgcaattgctgaatcacatccaaagaagatatgccgacttgactcaatgttgttttcacaaaattcacatgtgagtggacaaagaactcttttatctctcaatctactttgtgaagggaggcaattcctcagaattctccagattaaatgcttaaatttaggaggaactttcattctccaaagctccatatggcatggtgtatgcagtgcaaacaaaatattcttcatgtggcatgaatttccaaactcgcaggtcttcctctagcacgtgaagaagtggtatgcttctaatttcctacaagtcaacttcattgaagacttccaccatgaagtcttcttgccatgaacatctttgatgatctattagagaaccaacatgcatatcttctaatccttggggttgagccgtagaaacatatgggtagtcatttcttcgaagccatggtagtttccaaatagccatttagtttccatttccaattctccatttgataccctcttttatctcactctgtgaagcaaagatactacgccagacaaaactaggattatgctcaagtttggcatccagaaaaacaatcttgaaagtatttggctttgaaaacttttgtaacaataacatcttggaatgaaataaatttccaaacttgctttcttagcatagataaattgaaagcatggagacttctgaaacccattcccccattttcttttttaatcgttaatatgtcccaactcatccaattgatactcctctgcatattgtttttggtaacccaccaaaactagttcatcattttttgcaattcatcttctagtgaagagggaagaagaaatacactcatgcagtaagataaaattgcttgtgcacaagatttgattagaatttccttactcgtctttgacaatttcttgcttgtccagtgattgatccttttccacattttttcctttagaaaaccaaatacttctttcttcctccgtcccacaattgatggtagacccaggtatttttcagctcctaaactttgttgtacccaagtgattaagatttgttgcttgcatttatctaaggtgtttgagctaaagagaactcctgatttatggaaattgattaattgccctaagtcttctccataagtgtccaagatatgtttcaaagtattaatctcattttcttgagtcttgcaaaacagaaaacaatcataagcaaataaaaggtgtgaaaaggtaggagcaccttgcacaccttaacaccatcaatatctcctgttctctcatattttttaattagactagaaagactctcagtacaaagtatgaagagatagggcgatagagagtcacctgtcttagtcctctcccaatagttattggtccaataggattctcatttaccaagattgaatattgcacagttgtgagacaaagattcatccaaccaatccatttttcatgaaatcccattttgctaatgtcaattttcaaagctacgtccccacttttccttgagtcttacatttcatgtggtggataatttctaaggctagcaggacattgtcaattataaatttgttttatacaaaagcagcttgttcaagagagatgcattttggaaggattgggttcagtttattggctaagatttttgaaattattttgtaaaggacattgcaaagggtgattggtctagaatatttcatggtggtagggtttggacattttgggatgaaaagaatggttgtggagggaatgtaccttgttataaccaagaataggcaactttatgcactttaggtccaaggagatgccaaaatcttttgaagaatgttggcttaaggccatatgttcctggtgatttatcaatttgagcacgatattttaggcgcaattgcttccccctattattcgtatcttctatgcatgccttcaatttagtaagaaaatcattggacaaagagattgtccaactattttcaaccaaatattgaaaatttgggtccatcgaccattgattttcaaatctaaatcttctccaaaaatgttagaatttttgccatgaagcctcagtaggattggagagtgaccagactttgaggatattgtgttgagcagcctaaaattggggaaattatcaatccattgcccagttgcaagtgctatgtccaacttttcttcaatagtatcatgctttcctcttcttctagcccatgtataggtataaccttctatagaaaggtcatggagattgtaatcaatgataatctctttgaatcctctaaaaagtcaattttgatgattattgataccatatttttcatttgaaagtagatcattgaaatctccaaaaatgcaccaatcactcaagtatgtgcaatagcacatagaagattccatgagtcttatcttctatcacgttcatgataaccatagaattcagtcagttgccatttaggataaccaggaacttcacaaaattctattttatcatcaattcaatcaccattcacgttttttttttttatttttcttatcaagaaatagattgttttatttggatgacttagatgtctcatattttttagaaaaaaacgatttgattgatgagattttgtatgataatacttatgagattgatgtaatttaaacatttattcttaaaacgtacttatttgactccataagtgcaattatcatcccataacatgttgccaagaaaacaaaactcttatttcttcaagcaaaattccaagagaaatgaagttagatgagaattggagaatgcagcaatttaaaggatgtttcaaaagaaagcaatgccaaccacttcgatcatatagcaattatttattagagtgtgtaagctagaactgacacttaacttggattgagacgtaacggagaatagtccaaacgcgtataggctagcactattgcaagcttttgattatttttttagaagaatagcaagcttttgatgtccattccagatttgacttatttcatagatcattatctagaatattaaataaactaaaactaaattagtaaagataaggaagcaacaaacgtgttacttgataatctcatatatgtatataatctctacttctttttatccatctttattgttgttattagattaaattgtaatcttggttccactttaattattgatttacaattttggttcttttttttttttttgtttttctattttagaaaatatatgattttggttcaattcttaattttgcatgtgttatttcttttattttgatctatttgagtccaagatttaacatatttatttaagatatcataaaaaaaaatccaattaattaaagtgtaaaaaaatctatataaaattaagaagtgaacaaaattatggattttttaaaatagaaagaacaaaatcacaagaaaagaaataggaaaacacaaattaagtacatttgacataaatttaataataattaaatttataaaataaattttaattatctcatgaaattaaaatttaggggtggacctattcacaatgtcatggaaaagcttttttttttctttcattgcatctctaataaatacttttggagaagttaatgcaaacatgccctaattcataatgcataagaaacggctccctattcccaaaacaaaaatgattttttaacaaacaaaaatgtgaatagcacgaatctatttgacatttgaagacatttaatatatatatatatatatatatataattaataggagatatgataaaaagaaataaacaaaatataaatattaataaaatatttaaaataatataatgttggtatgtcattactgttccaaaaagcatacataataaaaaaagaaaagtaaagaactttcaatctaccttctcattcgggattgggagaaagattagcattgaaaatcataaaaatttgtaggtttccctttatattcaatgaatttcactattaattttgtaatttttaataaattttgtatttatcttagattgagagaaggctgagaaatgagatcgaatagtccaaaacgtatagaggccagcatgcttttttccattgcagatttgacttattacataaatcattatctagaatattaaattaactgaaaactaaagtactaaatataagaaaacaatctacgctcacatacgtgttagaatttaatagtgaaaatctttgttactacatgatgatgacctcatatattttatattataataaattttatgtctttttttttcttcccatattgttattgttgttattattattatatataattttttaaatgccgattggacaagtactacgttcataaaattttatcatttttttatatgtaaaatggtagaacgaggaggtattcttaataatacctgacatgatgctggcattaaaggtttagtcaagaagttatttacggatttaaatcacaaatgaaaatttagtaggttaaagaaaaaattttcaaatgatgtaaagcgatcaaatcaaatttaaatgagttgatattgatcgatttaaaaaaaaaattcaactcaaatcaatcaattaacatgtcaacgagtttaaatattaaaattcttgatccaatccaaaatttgattaatttgattttgagtctgatctaaatacaaaaattattcaacccaaattttttggattgatttgggtcaatttgaatttacgagtgaaccgcacttatttatacccctaataaatatgtaatgataaattagaaatggtgtattaaattttcaaaaaccaaaaccattattcattttccttttcatttacggttcaaaatatcaatttagtaaatcaaattcctagggctttttttttttttaatttaacagtttgtagtacggcgaaatgggttttggaatttattaacattctccaaaaagggtactgttaataatccttttcttaaagcatatttaataaaaaaattaattccatgacatgaagtcctatataatttaatatatccttaactttgaaattccacgcatgtttaatttccgacaaaataaaacctaaaataatttccttaaaagatttgttgtgtataaattttaacactatcaattaattataaatcatctttaatataattttaaaaataattatcataaaaattcaacaaatttattatatataatactactttgtggttttttttgtgaagataatattttgtgattaaataacaatctgaaaaaaatttacacaccattgatgtatatattatttattttactaacaatttattgatttgagtgaaattagatttcgttttttaaagtaaaattttattcttataaatgaaaaaaaacgtaatcagaaaaaaaaaattcacaacaccaacgtcataatgaaaaaagaaatattgtttattctattttgggcatgcaatgtatcgtgaaagaattctagaaaccatgcaaatgacgtgtgaagaagaaatttggtaatagtaaattgcgttataatttccaaatgggtgggggttgccggcatgtggccgataaaagattaaacataaaaatttgcgtataatgggcaagggcaagggcaaaccactttttctccaccctgctacgcgtttatgccttggaatcgtggcagattcccattgatccatgataaaaactcatttaatagcagcgatacccttgagttttattatatttgctacgtgatccaagttggacgctataaattgaccattctttgttggcttgaaatcatcaaaatctaatttgagcaatcactaacctttctctatagtgtctgtctttgacacttgttccgtgttgtaacataaccccatcatgtgtaacataatttcttgtttaaaccacgtgtgtgtttgtgtgtgtaattgcaagatgatatgagtgtctgaaaaccctctagttggatcttgagaacaagaaacgtaggctttgttccggttgaattacagtccaatcaaccattgtgtccaaataacgaattaagtgtcacctttctttttcttcctattctttttatcaataaaccaatcttatctcattaactgtgacatatttaagacatgtcccaagcaacctcgtcctcagctggtggtggtgatggtggtgccaacattgaacttggtgctaccttactcctcaccaccaccggcaacagcaagtacaccagaatatggcgtagaagtttatacataagattcctcatctcagtcaagaagtcaacaacttctaccgacaaccctgagtcgccacgatcactactttcttcagtaccgtacacttcagtacctcctgctagaacctcctcttccaaatcttcagttgcaattgatatagaagaagaagaagaaagagaagagcacattaggagtgatattgctcgaattgtaaaggagaaggacttgaaatccctcaatgagcttggtggcgttgactccgtttccgctgtccttggtcgtcaacatcaatactcaaaggtatatatcaaccttctcccctcctcatattcatgcccttttcttcaacaataaaaacaaagaaaaataatgaaacttgggttatcatgttataggtgtgattcaccaacttagctgatgattaatttctacaaaagaacctgactgatcacttttagtgagatatcttctctcaattatgttttttcatccacaaaactcgaattcgagatcttgtttaaggaatctgagctcagttctattcggaccaacaacttcttgctaaactcctatactacatggaaaaacattaaagagggagtgattcttttgttttttcatccacatggtggttatgatatttggaggatcccttctagtttaaaccatcaaatttctcggtttattgaagtgtgaagaaggatggatctactaactgttgtttgtggtgggttgagatagatgtgttttgttgatgggattttgtttttatgaacagggcaagaccactataccattaccagttcttggaacaaacttgtccaaattttttttcaacagctgcaagttctaccgctgcacaattttggtgctgttcgtctccgctgggttgtcattcgccataggattcaagcaggagggacctaaacatggttggcatgatggtgttgctatagtttttgctgctttactactggttgtagtaaattcagtagcaaacttttggcgtgagaggaaaatgttgaaattggcaaagacaaaggtcgagttgcaattcagggttaagagaggtgaagagatcgtaatggttcccatatctaatattgtggttggtgacagagtatgcctgtggccaggtgatgaggttccagcagacggtttgcttgtaagtgatggcatccttatgctggctgagcctgaggcaacaaaaagcaaacatgatcctaaggggaacccgtttcttatatctggttcaaaggtgattgggggccagggaaggatggtggtaacatcagtcggaaccaacaccaatttggctgaaaggaggggcttgtttgagcaactaatcgagaagccaatttcttacgttgacatagctgctctttttatctctctactggttttacttgtggtcttcgttcgcctaatttgtggaaaagatgggaacaatagtgggttgccagaaatgaaggggaaggtctcaattggcttgttgatgaaggcacttcagagagctttcttgagaccccaaggaacggtttccactttaacacgccttgtcactgttgcaatactatgcgtgcagcatggaatgccacttgtggttacaatttctctcaagtaccagatggataaggtagttccaaaccaagatgctgttctaaatgatttatcagctagtacgacaatggggttggtaactgtcatctgcattgatgtatcaggtgagctcatatctaaaccaatggaggttagcagagtatggatgggggagaaagatgtcagcatggttgagggatcggaaatagataaaactgcgcttgacatgcttaaacaaggagttggtttatcagtccttgcaccagagatttctctttcctctttgtctaattcacttgtttcttgggcaaaaacaacattggaagtgaacttgagatctttcacagaagagaaatttgacattcttaagcacagcaatttgaattctggcaaagaaggcagcggagttttggtaagaaaaattggggacaatgaacaagttctgtacatgcactggagtggagctgcatccacaatattggatatgtgttcactgtactatgatagtataggggaatgccatgccatggaaaaccagaagatcaaatttgggcaggtgatcgaagagatggaggatggtggccttgagccaattgcttttgcttatagacaaacagatggagaagaacttgagaaagaagaactgatcttgttaggactgataggtctcaaatgcactactagtctagaatccataaaatcagctttggaaaatctgaaaaaaaatgatgcaaatatacagatcaaactggtctcggaggatgccatcatggaagtgaaagacatagcttgtggactaggactagaacatgataatgtgcttgaaggaaaagagcttcgggatttgaatggggaagctagattagacaaagtggatcaagcccatgtaatgggaagcttccatcctaaagacaaacttctcatgatacagtgcttgcaagagaaaggtaaggtggttgcattcattggaacaaggttgatgactaatcatacttcatttctaaaggtagctgatgtggggatagtttttgatcctcatgagaacaatagtggatatagatagttgtgacataacaatcaaatttttcagtgtattggaaccaattgtgatggctggcagaagtcaataccacaatattcagaagttcattcaacttcagctgacatgtaccatatcagggtcagtcataaccttgattacaacatgtactggagattccccccttgcagcattccagttgatttgggtgaatgtcttgatgtgcattctgggtggcctaatgatggtattgaagctaaccggtgaggaacggattgctaaacaaccatctgattataggaaccaacatattataaccaaagaaatctggaaaaacattgttattcaggttttatatcagacttctgtgtcaatgatacttgagttcggtggacatgttactggcaaggataaaaaggttagggaaaccatgatcttcaacacattcctattttgccaactctgcaattttctcaacaaccaggttctgaagatggttgttcagagcttctatttcttggtggccttggttggttgttttcttatgcaagtgctggtgattgagtatgctaaaggcctagcagattgcatgcagctgaatgctacgagatggggcatctgcgtcttgattggtgttcttgcatgcgtatttgaatggaccttgaagaatattcttccagttgttctcaatcccagcaccaacattgcttcagaatcaattacttcaccttcattctatctttctccagtatttccaattctgatgttcattctgttccctgtaggactaatttttagtcaaataggcatgaacatgacaattcgttagtgcaggcagatcaacttgacacgcccaacgactttagtcagtgtataaataatgttcctgcatatgtataatgttaatgtatgtattcatttgtggcagttcctttctttgtagtcattgtagaataatcatttgcttgtactaccgaatgtagataagcttcattgattccccatcacttccctacagagaattaatgtgaacgttagcgtttctaatctattattgtatatattttcagtagaacttgtttctgtcaatgtctccataactcaattcccatcctttgcatcacttgtcaagtttgctttataaagtcttgtgataataataacgtagaaagtgaatcacaaattagcttagccgtatgaattttttagctcagttggacttatttttcttcttttatatactctctttaaaacttttttgcatgtctccgaagatggaaaaagtagaaactatatatgcatgtttaatataagtgaaaatttaaaaataaagaaaccaattaagcaaatttcatatgcatgttaaatatcagagaaaatttaaaaatatatatacccaacgagaatgaaatagataaaagcttactttagaaataacgaaaaaagataaaagtttagaacgaaaaaaaaagttattttttttttaaaggcaaaagattaaattaaatagcaaatgaagataaagaaaatgaaaagataaactaaattagtttagactttcttggctaaagtgaagccttagagtacaaattcaaataaacttacatcccccgaaagctttcaagtaagccgaagttacctattagcttcgtttttcatgattccatatatggtaaaaaaaaaagtaattgcagaactcctttcagtatatgagctcgaattgggtgccagatatgctaattaattacttttatatatgatgctggcaagtgtgttttcagatggtgttcgggatgatgttgatttttataagtatgaactgcactcctttagctttgaagtttgatcattagtggataaattatttatattttgagctttgaaaatgtttcaatgaaacttcattcacactttctgtgaaaaatatcatctattaaagaactgtgtttttatatatgaactcttgtcgtggtcaatgctatacatgacgacatattaactatttaaaagataacttaaaattataaatagttacatattataaaatgcgatagtggacatgttaccacatgtagaatttatataataaaattgaatctataacaacaagacactttatgtttatgaaattgtcatgtatgtgacaataaataagattaatgaaattattataaaatcgaggccttaatctaaaattcaatatctttctatttattaatttataatagtaatataattaagaaatattgtatataagtaatatatatatacatatatattttttttttaaaaaatgaataaaatattttatgatcaattttttctattaattatgtcagttgttcatttaaaccatatttatttttcttaattttttgtgattgaatatttaaatagaacattaacctcagttaagctgctttattttgttttctcttaattaccgtaattctcatttaaatacaacttttcttgcttatgatattgagggttaattaaaaaaccaataccgtcctgaattttaatctaaaacttctagtagtatgttcggtttcacattttagatgggttttttcacattttagatataatttttaaaagttaatagttctaaattttgtatttcaaatgtggtttttccattttcaacgactttttaaccatgtacagttattcattcgtgatttttcatactaattttttaaactgtttgcttgaagagaccgtttttgacaccaaattaaagaggtcattatctcttctaaaatcctaagatataatttccacatgaaaccaaatttgtaatgtagcgaagatgagctgccacattgtgttcttgaggtcgaggcactactagccctgtgtttctgtgtggttttactagcaacacaaattttttcattttttcaaaaataaaaaaagaaagaagaaaaaaaatgtaatgagtcactcacgggtttgcactgttactgtagcatcagcccaatccaaactatcttccataccaatttccaagttttaatttaaatttcttgactttgttggacctgaattctgtggcttacattgaccctctcgaaaacatctgaggaaggagatctttgcatccacgtggcagaagaagagccactatagcatgtcgaaatatcagcatgagaatccacatccaaatccacgaccaatgaggtgttgctgagttgtgcatatcctgatccacaatatcatacgatcttctataaacctttgtagtagccttcttcattctccacaacacacaacaaaaccaaagaaaaaaagccttagccaacacaaccatcatggccacctctgctattcagcaatcagcattcgctggtcaaactgctctcaagcaggtcaatgagttcgtccgcaagaccggtggcgccggcaaaggtcgcactaacatgcgccgcaccgtcaagagtgctcctcagagcatttggtaactcaacattacccttcccactccactagttcaacttagtattacatgttttaatataatactcgcttgacaacataaattaatactagtaattccgcaaaacttagatgcaataccttttgtttttggtattctgttctacttcttccgtcccattataattatagtgtacgagaaaaaaaattattctataataattgtcattttaatttttatctatttattattttatcctggtatatctaaaagaatctttagacgactattaatttgaaatggagggaattaaaactggagttttaactcactaattcatgtaacaaaagttcgcattatatgttaagattatcaatgaggtaaaactccaaaaaagcatctatagaactatatctatgttttgtacttaacaattctcagcaggatggggctaactagaaagccagtgattatgtaagcataacagattaataatagttattgtcttgtcttataaagataaaaaaaaaaaaaaaacaacatcagctaactaacacatatgaagctaggttttatcaatttgtctgagaatgtaactgactttggatgaggtgttgtgaaaaacaaaacaggtatggccctgaccgtcccaagtacttgggtccattctcagagcagattccatcatacctgacaggagaattccctggtgactacggatgggacactgctggattatcagctgacccggaaaccttcgccaggaaccgggagctggaggtgattcacagcagatgggcaatgcttggtgcccttggctgcaccttcccagagatccttgagaagaatggtgtcaaattcggcgaggccgtgtggttcaaggccggttcacagatcttctcagagggaggacttgactacttgggcaacccaaaccttatccatgctcagagcatccttgcaatctgggctgttcaggttgtgcttatggggtttgttgaaggttacagagttggtggaggaccacttggtgaaggactagaccctatctaccctggtggtgcatttgaccctcttggtctggctgatgaccctgatgcattcgctgagttgaaggtcaaggaactcaagaacggtcgcttggctatgttctccatgtttggtttctttgttcaggctattgtcactggcaagggccctattcagaacctttacgaccacgttgctgatcctgttgccaacaatgcttgggcttatgccactaactttgtccctggacaatgaggatgccaacattccatgcaatcttctgctcccttttgcagttcccttgtgtttaactccattttcactaatgtaactacacctgtgtagcagaagaatctgtatgagaaccattatatttttatatattagaaatttgggtccccagaaaatatcaactcttacgtttggaattcagaatattgattggtttgtgtttttacatattgttttctatcttcccataacaggaaccacctttccctatatgttaattagttcaaacattgaaaccatgttcaaggaatctatctattagtgatgtacgtgccttgtacaccatccaattcaaaaccatgattaaaaccataaacgaatgaatccatcttccattaccaacaacatccaaagcccagaacaagagaaagagcaggcgggcattcaatgtatccatctaaatgcgtcaataatgtagtcagtcatgagaaaattaaaaaacaaagaagtgatgaaggggaagggagtaatgcaaaagctatgatttgaaaacaagaaaacaacatactcttgcttaccactttctttttactcatttggaaagaatgcaaatagtatacgattttagatttttttaatctcccattttttgtgaaatcaaatcatgaattacttatttttttacaccaatttctttctcaatactaaccttctttttttaattttttttttatcggaaccaatgagaatgtaaagcaacaaattaaaagttctgggttgcagcgatatgttttggtgtacacaaaaataaagtttgaacctaaactgtcttgcaaactacttaaacttaatgaccctttcattataagttgaccctagtgaattatctattgtagtaatctaatttaaatacccttctgttatcatgctaaataaaaaagaaaaataatcagtaaggattatttattcaatgttgattgttttaattttacaaaaaaagaatgttaatttagtaataaattaaatttctgttaaatataaatataattaataattgaataaattaataagttacaatttgtgtgggatttagggattatactcgaggttcgggaagggtgactcaaattgaagtttaccgttttcacttttctgcgtggacgtgagagtgtgaacatagctaaacatctcattcctttgaaaattattatggcttctcttctggattctgcttcttgttcactgtaactgctcatcatcacaaatgtgcattctcttccggttattcttgtttgtgtgccaaagcttgaaatttttttgtccttcattttggatccagagtgcttgtttgcttgagcagagtcttaaaaggcttttttttttttttttgttcagtgttctgttgctggcatttagtgtaacaatctttgtttcgcagtgcaatcaggaatattgaacataactttcattggattttccatttgtcagttttatatgcgtaattgtatatttttgttgttgtgtgtctataatgatggcactgatattcaaacctatgatctcatgcacactattccaatcccttaccactaggccgaccctagtgggttctgcgtaattgtatgtggtaatattactttttgtaataaaaattagtgatgcattacttcccattctaatacatgcatttgagcttttttaattgtattttccaaatctattcttattctgtgttttttggccagtagtaagtaactagctttccagattgggcaagaagggagcgacaagaagaaacacgaaaatgtttttccacatagtgctggagcgaaagatgcagctgcatccacgctactttggttgtaaccttcgtgataatcttatttccaaactaatgaaagatgtggaaggcacttgcaggtgattccccttaagatcctttcaatatttttttttcccactagaaaatgagttgtgctaaaatgggaaagaagatgaaatatgcgagttaatcagttaaccatactatttctcttatacactccctgaacttaacttgagtcctttgacaatgataagcttttcaagatgcttgaagttgtgaaagttagcagacagttacccaatgaataagtgctaactttgtcttgggtttctctcttttgttaaacttaaagaaacaatgaagcatgaaataaaagtacacttgaaacttgaaaggccacctcaagatagaaacatctgcaattgcaataaagtaacaccaaaataatcacaataccccaacctcaagtaacaaggactcaattccctctgagttaagaacccttcatctcatccttgccctctggcatgagcctttgatttttacccactacccagtaatacatgttaataagagtaatttttcttgtgcatttgtttggaccgtacataatttagatcagagaaaagtatttatccttaagtgactgatttggaccttagatggatgtaacatttggattttcaattattatgcagtggtagacatggatttgtggtggcggttacagggatagaaaaaatagggaaaggcttaatttgtgatggaacagggtttgtgacatttccaattaagtaccaatgtgttgtcttcagaccatttccaggcttaattcgtgatagaaaacatagaagctgttgttaccatggtgaacaaggtttatacagttcctttctctttagagtaatcaatctgtgtaactctaacttctggagattttggtttatgactgttgagttctttttgtgtagatgggattttttgctgaagctggacctgtccaaatcattgtttcaaaccacgtaagtttttgtcttttgtaatatttgagaagtggtctctattatctccatgttatatatctaaaagattgttactattgttcttcattttgaatattaattttttttcctttattgttcctgtcattggaatgctaggcaagttttcaattttgaaagccaatattatgtttgttatttattattgttgctattggaatgcaatgcaagttttttactctgtcaaaatattataaatgaggttttgggttacatgattattttgggcttgggagcctccattcctccaaattatcacataggggcttgggagagtgggaatgacaggattttgggctaggataggatgaccacatgtagataaattcatttaaatatatatatttatttattattatgtattgttatatgggatgtatccttatcatatacctgtatttgtacccatacagcatgggttaaggttatgcctatctgatttcttttccaagataaatgacttttattagcgtgaagatcttgaccatgaaatgaattattcagctcgaaacttaattatgtaatggacttctgtaactatttaatgtaacagttttggggccagaataaagatgattgtgcaaatttgagattggccaaatagaaaaaggcggtgcatgattccagttttcataaacacaggaaaaattccttgtattgtttgttttttaaaagatgatcattgtcagccaattattccttgtattggtaatgtttagaattaccgaggattattttctgttccttttctttttaaattaatttaagatagaatatgccattactttgcaatggaaaattttcaacttgtagttgtacttttacctttatatatatttttgtttgttatgaccctttttgccccacttagttgattccgggtgatatggagttccagtctggagacatgccaaattacactacttcagatggatcagtatatctcaattataacttcctcaatggaaaagaagagagcaaattgtttttttttttgtcttgttttttttttattttatgataatttttactactaatcaattggtcttttgcaagttaagattcaaaaagatactgaagtgagactaaagataatcgggactccagtggatgctactgaaattgtacgtacttctatatatattatgtctcttcattttgttgaatgttgttaagctccattagcttaatttatgcttcttctatttttttatataggcaaatgttagttgttagttttgttagaatgttagtgggagggatttgaacccaccacctctcccttctcccttcacctacaagtcaaccttataactcctagctttatgctaaattctgctttgagaaatttgaatgaataggaaagcatttttagctcagtagcaaatatagcttttgtttctccacaaatttctttactattataaattcctcccagaagagccttttagtttttgctaattttaatatttagctcatgatcactggcttcgccctagtatttgtgcatatcatgaaatttgtggaggaatttataatagtaaagaaatttgaggaatgctagtttatgctccgttagctagtaatttactgtgttggtaactcttttatcactatttaaattttatccatttcaaaagttatccacatggaatattagggttactaccaagcaaagttatttgctaccctgagggagttataaatttaccgtgtgcttttgtggtatgcaagaatgattactattccatggtgcagctttacttcatttctaaaatcttgaacgttttgactcacaaaagttgtgagaaaattgtgatcacaaattctccagttactgcatgcaatgagaatgatattatgtttaccacattgttgatgttacatgtttgactgtattgttcctgccatgattattgttgtatgccatgtgtgaacatgtcttaaaagaacacttgtctatggccttgtagcctaatggaagttttagcgagcatatgatactagtttgtatgctaataaagtttaaatactcctgaacatgcttagcctatgttttccttccgtttggttgtattgactatagatatgaactgtgacactgtcatgtttttaaaatgacaaataaagagatacaaattactttttcctttggatattgaatatttatctgattttcagtttcaatgtttttagaactcatttaactgatataatgcataaccttttttttttttttttttgcagttctgcatgaaagatgatttcctgggtgtgatcaacgacccggcaacaatttaaaaacccgttactgtacctttttgttggaaataggagagcatttaatggttggtacttttctaccaacatgcctagttattgtgtttagctgagttcaatgtatctctggagtatctttgtaatcggtttttattataattatcttaaaatcgctttttttaaggtcaatgttagttattactcccttcgtagcctttaaaaaaatttcaaattaattgatgctttcatttttcaaggagatactcaaatatctattccaattttgtcttgtaataaataatactgttttgaaaaatttaataatacatttattgaaatttagagaaaaaacaatgatattttagtaaaattatctcatagtatatattaattttcttgaaatacttactttattgatatgtatgaaaatacttcaaatataagtctttttgagatgaagggagtaatttgttaatttttgttaatgaaagaattcaaatccacgatttttttcctctcctctttctttcttaattaccaaattaatcttataattacttatctgaaaatcacctttcaacaaacttatctaaacaaaaattgattatgattataattgattattgaaatgatttaatttgtgccgctatcccaaacacactcatatagatcattttgttgactgaaaaacttactcaagaaaatttaggtaaaatagtaaaatttgtttctcccttacatagtatattacatggtataaaagctctagatttttttctctaattttatttttattattttatattgtgtgactgagactcttatcttacatgatgctttgcacggatttagtgttctagtttaaagagtaaaaaagttactcctcatttttattatttattttcttacaatttaatgtttattcgaataactaaccgtaaccgttaatatttcactgaattgattaagcatataagcatatataagcatgtattcttaagatatgtgatgaaattttatatccaactttaccatccaactaaactagccatattcttactcattctttaattggtactcaattgtaagagaaacaatcattgcatggcttgtcttctaacacttaacctactcatttcttccaagtttacaagtcaaatcaaaacccatttaaaatcatttaacaaaacacaaatcaattcaaagaccacaacttggtgggcaaaagaacctaaataatacaaattaaataagaaattacgaatttggggcaactttgaaactatttacgaatctggggcaactggtcacgcccagaaccaggcgtgactggtcacgcccagaaccaggcgtgactaggggggtagtcacgcctggttctgggcgtgaccagtcacgcctggttctgggcgtgaccagtgtgtatatataccccccggattgcactgttcactcacttctagcttttggcttctctctaaaagcttctctctgccttctctctaaaaagttctctgacttctctctagaagtgctctaggttctctctaaaagtttggaggcatcagctttcttcggtttccagcaacgaagctctgtgacaagtaagttaattttttttttaattctgaatgatatttaatttattattttgttgatttaagttagttaaatttaatttattattttgttgatttaagttagttaatttatttattattagttatatttagcacatgatttattttatgttgtagcatactgttagatggtaggatatgatttgcactagtttagggttatgatttagtattaagttaagggttacattttatggttaagatattgatttagtgttaggtttagagttagattttaatcccttaaccctaaccctaaccctaaccctaagccctaaaatcataaacataaaccctaaccctaaatagtacctttatttgatcctgaagtagattgtcatcaaattttaataattttaggattagaagattatagaaaatcggtaaccctagggaatagtgtttagaatggtttagaaagcgacttcatttggtgtgcatatgaggaatctccgagtcttcagaattacaatgaaaatgacatgtgggtatgggataatcccaattttgatggtgaattagaaccctttggtcgctgctcgagagtctcagagttggtgggtaaggagtgtatacaacaacgatattactgttgtatacactccatacccaccaactctgagactctcaagcagcgaccaaagggttctaattcatcatcaaaattgggattatcccatacccacatgtcattttcattgcaattctgaagactcggagattcctgaaatgcacaccaaatgaagccgctttctaaaccattctaaacactattccctagggttaccgattttctataatcttctaatcctaaaattattaaaatttgatgacaatctacttcaggatcaaataaaggtactatttagggttagggtttatgtttatgattttagggcttagggttagggttagggtgaataatttaacaatcgtatctgctgattagaattaattgatttgttaactataaaatggtcggtcggtctcgtagatggctgattcatcatcttcggcatcttcgcggtctgcatcggatgacgagggtcagacattggatccgacgacccacgttgtgcctaccccatataaatggggggttttgcggaggcgtatccagagatgtcacgtttcacaagctgtgtggaacggtgacaaagatcgtgtgttgaagactcggcgcggcaagatatcagggggcccaaactgtgatgatattcctgcaatcgtttcagtcatgttaggccaggcaggattcttacatgtcgcacgcatgcgacatatccaggtataaattttgtaattggataagtgtttatgcaaattaattcctataaatgtatttttttttatatgttttgtaaactttatttcagattgatcctccacttatcagtgctttggttgagcggtggagacctgagacacatacctttcacacgccacagggcgagatgaccatcacgttggaagacgtggctggtatattaggattaggcagtgagggtcaggtcgtcaccggagctacgtctaacgactggcccagtatcatcgaggaggtatttggtcatcctcctctggagtctgaggttagaggaggattactgcggctgggctactttgataggatttacgcgcggtgggacgaggtgggaggggaattggtcgaagttatcaggttttcgaaggcgcacatcgcgcgcatcattggaggatggcttctatgcgacagatccggcggcagcaatgtcggttgtcgctatgtccctttgctagcaggggacatgactgatattggtaggtatagctggggatctgcggtcctcgcacatttgttcagacacatgtgcgagtgtacagatccagataggagtgacatcggtgggtgtcacgtgttactgcagatatgggcgtggctcagatttccaccaattgctccagctataccgcagcctactcatcaggagtggcatttcggccacaggtatgcattcttattttcttttattaatgacctttccacccatttcttttattaatgtgatttatttaaaatttaggtttaatactttagagaagtttgttccacacaaccttccatggtatcgggttacgttagattcccttgctcgggatgaggtacgttatgttatttgcttaagttttggataatttgcatattgttcttttgtaattgtgtgtttaactgttttgttcaggtcgtatggcagccgtatgcagggtatcatttccttggagctactgagcatgagcgactgttgtggatggcaactacgccagtgatatgcttccacacagtcgaatactctcatcctgaccgatgcatgcgacagtttggaagggatcagcccatccctggaagtccaaggaagttgacaggcgtgcatgacctatccctgcgagggaaacagatggataattggacccgcaagctccgaccctttattcgtcgttgggatcgtagggaccagcacatagagctgcccccccaactgactgggttcatgtcaccaaaccatgagtacatggcttggtacagggagaacgggaaacgatacatcacgaagatggctgcgaagatgggtcgtggtgtaagtgttttaaatataatttgtaaactaattttcattatgatgtcgttattgtatagactaatcaatttgttgggtaatttgtagcttgatggacttgagatgatgtattgtgccagtggcgggcaggagtggcctgggttcagcatggactacctgcacgtggagcttggtcgcattatgtcgatgtttcgacagagctgtaggttggaggagccaggcccagctgcacccccgtcacagcttccagctgaagatgacccttatgtggatgttcctcgtagccgtcgtgagggacacggactggagcgtcaccgaaaagtaaggcgacaagttcctgagatcatacccgctccgaggcctcgcgctgaaggtacctatagggctccagtgatagcacctacgtacgggagccagactttctattaccagtcttcgcagcaaccggatatgggctatcaggggttcagtacgcagagcgacgtgccaccaccgcaagagtacgggtctcagcatgtctattacgccccaactttggccacggctccgctggactgtgggactagttctggcgttcctgctcgagagtggactgatgaggacattgagaggatgatttattatagtccggatagtcatggagattggtcagcacatggggaatacgacaccccaatccctgaccatcctgacccagaatcacaggatccgatgactgcatgcccaccaatatatgcagcccatcctcagccacccccctccgatgcagggccttcgcagacagccccctccgatgcagggccttcgcagacagccccttctcagtcatcacatcatcagcctgtgcatcctcaggcaggatcttcgcggcgacgtgttagacgggtgaatcccgatcgtgtagcgcgtcatcatcagtggccacctgagtcatagggtttatatgtatttacatttgtgttaatttatttgttgtttcgtgtaatgtatatatttatttttaggtgttatgaactatatttatttttttgttatgcactttatgcaccaatttgttcttggttaacttcaaatgtagtataaggaccgtcattagagattgaacacgccaaacaaatggaggcgtcactgcacacgctcaaatagggcgtgaccggacacgcccaacagatggaggcgtcactgaagacgcccaacttaggcgtcacagaagagggggtcacgcctacacttaggcgtcagtgaaccttatataaggattaccatccaacacaaattttatcgactactccctcaatctaaatacttggctccgtaactgtaagattgttttgctatggcattcttagcagaaacaagcagccaaaccattgataactcaagattagccttcatttatgcaaatggatccatgaaacacaacgaaagcggtgtttcttttgaatgtccctctccaataccaatgcgggttcccgatcagtgttcttttgaaacactgaagcgtaggatgagcgacacccttatgatacgcgacgaccagtttgttgatgaaatctactacagacagccaaagctacatccaggtgaccaatttttttttcattcttttcaacttacaaatgataacgatgtatgcgtaatgttgatgtgcaatgaacaactgtcgagcattgggcctatagaaatattatgcaccataagaagaacgcctgagggtatactcaacctgcttcaatccaccatggtcccaacacacgatgcaatgctatattacaacggcaagtggaacataccacgacaaggcggttttgtgggctatgcattcacgggaacaaatccaatcagatttgacattccttcaggctgcaacattgaaacattgaagtatctaatcaagcaagttgcgcctattggacttccccctaatggaatccacatgtcacagctggtaacaaaaattttttttagacagccacaacatcacgcttattcagacaacacaatccagtatcacatcaaagagttgcactgcgatgaagacatcttgaaggtgttagctgaatccaactactggaaacgtttttgtccgatacaaatattagctatttttagcaaacccgtacccgaattagaataacgcatatgttacaccagacaagtgaaactatgaatttgtgttgttattttcttagttaatgttgttgttttattaattaatgttaaccgtgttttgtaaccactgtgttatgcgaattaatgaaaatgatgaaatggtaaacatagtctgaaacataatgtcatatcctaaaatacaaaacatttcaacccaggtaattttacaaactattttaaattaactactgaaatcatgaaacaccaggacgctgaggacaagctctccgattatgtccaacagccttgcaaattccgcatctgctgcgtctttgactagtttcgacttcatccatctcgttccgaattctggttgcctttggacgaccctttgcacgcaacttttccttgtcgggtatgataaccggaccgtcactcggtggaatagcaccttcattaccaattggttgccacggaaatgagtaggcctgcaccaaattacttatgaggaacacatcgtcaacatactgaaaaggattctgccgaacatgtaaagcagctgctgcggcgtgactgcatgggtatctgaaggccttaaacttgccacattgacaaaaccgctgcccaaggttgactgtatatgacctctcacagccttcctccacctcaaactgtgttcggtcaagattataagtgcgtacgtggtggcctgtagctacggtctggttatgcctcatagcatcaaccacatttctgcaatgtcgcgtcgaaccctcaacttgtgaaatagccgcctgacccctcgttacaaaatattcaaccaatctgctgtacgtgtgtttcaccaaagcagttataggcatgttcctagctcccttcaacacccgattgactgattcagacaagtttgtcgtcatatggccaaatctcctcccctctacatcatatgcacgtgtccactgttccttggggatgctatcaatccattctgcaacctgagggctgctatcacgaaatcgtgctaacgccgcctcaaaatcaaccataaagggattataacctgcaaaacaatcatccgattaacactaatctacttactatacgaaatattttaatatcgtgtcataattgttaaccatacctaaattcatcaggttcttcttcaagcgttgatctctgaacttttgattaaaattactggcaatatgacggaggcaaaacacgtgatgagcatgagggggttgccaaccagcatgattcgccacagcagatagtatgctgcggtgcctatctgaaatgagacaaatgttttgcctctgagtaacgtgaaaacgtatgttagccagaaagtatgaccaagcttccaaggtctccccctcgactatggcaaatgccagtggcaggcattcgttgttgccatcctgggttgtggcaatcaataatttccccgtatactttccatacaaatgagtgccatcaatctgaatgattggtttgcagaaattaaatgcctggcaacactgtccaaacgtccagaacatgcgatgaaacacacgctttccccgtaccagtcgatttgccacaaaataatcattcgtttgaatatcataaaaagcacctggtgaaaaacgaagcatatagccacaccacctgggcaaaaatgcatatgattcttcccaattcccataaaccattgccattgctttctgcttcgcgaaccaggccttacgatatgaaactctgaatccaaatgtatgggtgatcctttcccgaagcaatgaaatcggcacagacggttcctccttgatcattcctaacaattcaaaagtaacattcacattaaatttaaccattattcaacacatacagaggaaattttatacacacgtacctactaaaattgaggcaataacatcagcatcaagctgtctatgaccctgtgaaatatggtcgttaaggcagttgtgattgccgccccatctcgaaacaatccacttctcaccgaacgccggtttagttaccctaaccctccaggggcaaccctctttatgagcaatacacttcatgctaaacttattaggcttgctctcaaccacataagcctcttgatgctccttcatcaggttccgcttacatgccatctgtgcatcctttttggaggaaaattcctgtttcacaaacaacggatcccctaattgccatggaccctgcactgaaccggaaccggaaccgacaaaagattcttcttcacttggatgactccaatcaatgtatgtgtagtgaggaattccatcccaaaaaggagtcacctcagcaccttcaaataccaaatcaattgaataaacataacatgcacactaaaataatataacatacagatatataaatgattttagtcatgttacataccttcaacaggttcttctgattgtctacctcctacgtccggatggtgatggatttcagatgaccccgcagcagtgcctgcttggaattcagtcgcatccacaccggcatcgtcatcattatccgacgcactagcaccctcttcaagaagacgatcttccatgacaatgttctcatcatcgtcatcctcttcgtcatcatccataacccaagttgggtcatgtgaatcttcctcagacacatttatagatggagcagcacatgacgcagccacatttacaactggagcagcatatgacgatctacgcctactaggatttaaaggaactgacctaatgggtaaaacatcatctgccacagtatactccacgtacaactctaaaaaatctttcgttgccaacttaaaaaattccaccattagcaactttacgtcttcgtcgtccacaacttcaaaacccatgtacttttcacgttgccataatcttcccgtaatacgtgtgatacattggttgtcttgcagacgtaatttttgccgtatcttcacatgtacatcatccattgtcgagcttcgcttcaaaagtgtctgccttttttccccttcaaaaacaacaccttctctcccttcaaatatccttccattataatttaacacaacacggacaaattcctcatcacctgaactcatttgtttcactcaacaaaaacaaacactttttcccagagcttcgctgtacacataaatttcaaaacactgtgttagaatatcttcttaaaccctaaaccctaaaccctaaaccccaaaccctaaaccctagctctaaggcgtataaatcctaattcctaaaccctaaaccttaacccataaaccctacaccctaaacattaaaccctaaccactaaaccctaatctgttaaccctaatatgtgaaccctaatctgtcaacactaacccctacactccaaacactaaacagcatgaagatgacctaaacgtgtacactaaaccctaaccagtctaccctaacctaaactaagctatacaccataagaagcattttcgacaacactaaaccctaaacactgacaatttcataatacaatatattaattaatatacacaattaatcaaataacttacttgttcgcagagcttcgctgcaaaatcactaacactactcttctgcaactcgattcaacaatgcgcaacactgagcaaagaggggaaactgcatcgggggggtatatatacacactggtcacgcccagaaccaggcgtgactggtcacgcccagaaccaggcgtgactacccccctagtcacgcctggttctgggcgtgaccagtcacgcctgattctgggcgtgaccagttgccccagattcgtaaatagtttcaaagttgccccaaattcgtaatttcttatttaatttgtattatttaggttcttttgcccaacttggtgcatataaccaattgatactccacaagaccacaaccattaaaattgcaaaaaatatctcatctttaaagataatcccatcatggatatacattgttagctccactgaacccattcacaacccaatattcaaatttttcctttcctaaagactcaatgttaattagaagaatggtgaacaatccagcatttggtcaagaaacaatcaaattcgttccaaacacaaacttgtatgaaggctaccaagttacagttacaggttatagatgaaaaaaatgagacatgaatttagcaacttgccaggttaacatttcacaaaactaagctttatggctttgtatcaacccaaaatccacaaggaaaaatatggaaatttattacaactataactagaatttaaaagtagctagagtgtatcgttaaacaaaacatatgcttacaccgtagattgagttgtctgtctttccttcatggacactacattaggactaatttaatcattgatggcaagctccaaaaatattccttctctattccttttgtctcttgtgcacagcaccacactctccctccagctccaaaacaagaatagtgcattcaacagttaatgcttattaaaaaggaggggtattataccagcaagatcaaacaaagaagtaccatctcctcccagataagcattgcattacctaaccatttattctccacaatactcccttccaaatgctactcagcatcatcaatttggactctacctctcacccttttcctccttcaaaaagtccctttggccacacatccagcgaccctgctttcccctatactaacttttagcaattatctatttggcatgttctccaacagcagtcgattctaatctctgttgctatcatcaggaatcaataaggagccaaatgaataaaataaacgatgaacagctaaaaatgattatctcctatacatgcacttccaaaccactacatgccaaaccccaccaaaatataaagaagacacctgattgaaaattttactcactgccaaatgggtaggcaaggtaatgatcctagtcctaccactgtgaactcctccattgctcttcttcaagaaaggtttagacagttggagaaggtgaaagaaagaagagaggggaaacaacttcttaaactcttgtcctctgagaccacctcctcatcatcacaaaactctcaacaacaaccaaggttggtggctccacataggccaaccctccatgactctctttctcttggcctcaactccacaaacaaacaaggtggtcatcacaacaccatgaacacgaaaccacctccatcctccaatttatggccacagggagcatcaacatcaagaaattttgatacctcagacgttgatacttcccttcatctgtaaatatatgtactactgtttgtcttaatttgcttccccagcttgtaccttgtataatagatgcataataaccctctgttcgatctccatcattttgtatcaataatcaaggaggatttgtatcagtgatgcttttctttttcccccttgaaggtatgtgaatgacatatgacattagtaattgtatatgacctttcctaaacaaaaataactcggcatatttataggccagaatacagtactttgcagtggcttgatcgatgtcaagaaggcagtaatgaacgtaactcaattgtagctggactttatttcacagaatcgtgttctcttcaaatattaaattggtatttgatatcttggatgtttaatactactgtaatttaatttgtattctcttattttagagaagaaaagggtagtaccaaagttacataaactcgtatgtaagttattatcaagtgacaaattgatataaattaaaataatcttatcggcgtataatttaatttaatacttttattacaaaaaagtactacctaaagtaacatacacgcatatatgaactgtgatttagtgatatactgatataatttttcttttttgcataagattgaaaatttgatccattcacattaatccaatattattttgcatttcattgaaaacaaaaataaatatttttaagacagctaaaaggcattaaacatttttattgtatatttattaaagtttaaagcttttaaattgttttaaaaaatcagtaataaattatatgtatttagtttaacttattttaaagaaatagtatttattttcatcgagaaaactaaaataggtgcagtaattatttcctcaaaagtagtcatttccaaacttgcaattagttttttttacttataattgctatactgatcaaaatcattttttttaaataaattttgtagaaatatgaaattatcatgctctactccaatatcaaatcacctacttataattatgtctaaacacgtgcgttgagacatacaaacacgacaattatattgtgctctttatttatttggcagtatcccaaggtggctttagttggacttatatatttcttaatatattcttcagaaattaaaaaggtagaagctatatgacatgccatactgatgatatcttattatatttataattcttaaaaaatatttggcaatattttgaatttaaaaataacaactaaattctgatatttattcataagtatttaaacatttttcaaaatttaagatacatcactaacagtaattttttttcattaagtacaatcaattacaagaattgagtaaatatctacaaataaatcattaattaatccttttatgtgcaccaaagatatttctctaaaactattgaaaactttgcttagtggacaactcttaagaaaattcttagacgttgaggatctagttgaataattacgattgaataaaattgtatgtgatttaaggttgtgcagtaattctctaattctcttaatagatctatgttaacaattcaatatatcattggcgtgtttttctgttatactaaatgtatgtaaaaaaacaatctcaatacatttggattattttacattcttaagtatgataggaagcaagccttttacactaaaatagtttatataagattcgcaattccaattttggttcaactctatgcattatacatttatacatatacaatatttgagtttcactcttttgattttttactgtacactaagtattgttggtgcctcttttttctaattttattatttcttcgaacttttattgaaaaacttatgcctccaattcaataatcatagactccatccaccacccaaccaagttttgtctgcttgacatataaccgacaggacaacgggcctggctgaatgctaacgggcctggactcctgggccattgcgaaagcctcctttctcccaccatggtcatttatcaatgagatgttcttttccaatctttgttttatttattttgaaagaaaattggtctcaactctcaagagacaagaatatgatcgcaatcaaagttttgattaaaaatgtaatttataaatattattattattatgctaaaatatatttttggtattcattgaatatgaaaaatatttaaaatttatttttgtaaaatttataatacgtttttcattttcataaaattaaaatgtattattttttatataatatagattcaaataaattcaaacttaggatgataaatttttacatatatataattaatataacaatttaatatcttttatgttgattatatatataattgatataaaatataatattttttataagtttaaatttatctaaacttacttgagttaaaaaatatattttaattttatgaaaatgaaaaatatattgaattacaataaagaattccgaacacttatatacttagaaggaggataaacaaattataatagtcgtacaaatctatatactataataaaagaataccaagctaagcaaacgtggccttttatttcgttgacacctcatcaaaatcttacgtgtcactctcttaaaaaatagaggctttttgcatttttttttcctcagctaattatttactcttccttcacaaaacagcacgtccaccgccatcagtgaaaagctggtcatttttaaaatttgaattgaaaagctgcagcttcagcctacacaaaaatttcaaatttgaaattcgaattcaaactcagcctctctcaaatctcctcttctacattccttctctgtctctctctcaaaaattttcttccttttctttctttcttcctctccgtccattccagtccatcattgcgccgccatctccgaccgccgtcgcgttgcctttgttttttcttctcttctcttctctattttcttcttctctgtcttatacctcttatatttacaaagtttgcgttttttttcacgtttgggtatgttttctttgcattttttaatttgggtattttgcaaaatgtgttttgcttatgaagtgtttgacaaaatgtctcactcaaatttctattgttttgtttataagctttattgtatattgcaataggtattttaatgttcttcaattggctatgatggttcgattttagtttcggtttctggatctattttaatgttcttttattttgttcgcacgtggataatatttcagtccattactgaggctctggaaacgcaagcactccatcaagtaacttaactaattaacacaatttattttgttaaattatattctaatatcttgagttattatgttaggtatgggcaacataagtctgtgagcaaaagcaaagaacttgcaacattcaggtttttctctcatttatatggatgcccaagcttctatttctgtagcatatcagtttgaattctgaataaataatggctagaatgagtgtggaccctaattttggaattggattttgatcttctttatcaaattgctaagttaacttcaagttaggaattgtttgataatgtactgctgattctttgcgggtttatattgtaacacttgccgtaaagatatgaaacactatagaaactgcagtgcacattatagaaactaccacaatatttttgggaggggtagaaaaatttaatggttgtgtgattattatttggaattgaatctttaattatttccattatttcagatgaaacaaatttaagtggttggctttaaaacaacatgactacattgtattagctgttacctctcaattgccaaaggatccatttaagtatcttgatgttgcttccgtaattaactatgaacctgctcataactccacatgctcatgctatagtggcttagataggatcagttgcatgctttagagtcttagactaacaggatggaattttgtaatctgggtatgattgattttagtgctttttatttgattgagaactttactgtgtaattatgtggattgcagaatctcttcacttaagtttttcatatgtttttcataatggtaataagagaaaaatgatttggtttcacggaattctgttctctcttatattagttattttatttcatctttctctatgatcttccagtattaacaatttaatataataacagtgaatttctactataatggctggtggtaagtcttacatactaaataaataatggctgcttgtgatgtaacacaaaatccataaagaagacaagaagattgtgacagaggactcatgttctgtaacacgcatttgaaagaatctagcaaggaggaagtcaatgaagatagagaaagccgagagcacaaggtgtctctttctattttttttcttcaatatttattttttattttattttgctgttagaatttaaaatcaagacattagagcttatatatgcatgtgaattgtttgtgatattgtgttttttaaaatgatattgttggtgatattgtgttttttaatatcaagctttgcttttatttcatttctgaatgatattgtgtttttaaagtttgattggtctcatttgtagtatgcaagtgatgtgtttgatcaaatgcatgaatgaactttatatttctttataacaagcttcattttattttttaattttgtggtttggtatttgacaaatatgaacatatggacaatccttgctctgtgaatcattattttttaattttgtggtttggtatttccgatttatattcaacaagcttcattttttttgtttatatcacaccttggcagtagataccgtatcacgctcatcagttgcaagccatgttacataagagcttttacattagagcttttagattaagagaaaatacttatatttagttttgaagggctgcttgtgcttttagtgctgagtgttatgccattatctgaagatgcactgttgctgcagtgcttttatctaacgttgtggtgttttgtgataggattatatggttgatgggtgcgagagtatttcagagatttactctatcatctgacattgttaaggtatgtatgagtgaattgtgagttttcatggcttgaatttgaatgaaatgcgtttgtttaatttaacccgcttttgtatctcctttgatttttttgcttcctatatgagatgatagctgtgaaaattcatcaaagtaaacctttttcagctatttttctactacaggttggttgtgtcactacgactgcaagttgcttcttttctttcaatcacaaactgaatcattgatatatctacttttatcatgacaattacagtataatcaaagagattaactatatacaccctgccacattttcattatggttctagagtgaatgttttttattctggctcatgttgatatagctttttaataattatgtgctttgtttagaatatagctatgtgtccctgcagatcattccaggcttacacttgtgcttatgctttctttattccacctcaaaacaggggctggtgttatattgtgcattgaaaaggcattagctcagtctggagtatcaaaagaggatgtgaattacataaatgcattgttttggtcaaaaacccatggtgaatttccttttacatgacattattgctattgttctattactagccaattaaaatttgaaaggtaattataaatatgcaatttcctgattaaaattcctgattaattttggaaccatgacaataaaatatgcaaattcctatttgtttcatcacacgattcactaatgaaaaatatcttatggtttcattttcaggccttcttctctgctaatgctgcagctcaggcttcgaggaagtcctctccaagagtgaccaacgaggctgttcagaaggctgtgggtgcttatttcaacttccctttttgttaacttcgatatgttgtaaaatttattatgctgttactcatggcttctattctttcctcttaggctgctgcattgaagagtcatggctagcatttgctgcccaaaaaattattgaagttaacgcattggctaaggcattgtctggcaacaaggatgaggtaatataatttgattatatctattatctatcaatatacttataataaaagaaggttccttacctgtttctccttgcttctccttgcttcgcaggttcggattctcttctcccagcttcgggctcacttcctccagcttcggtaacctcagacttctatgtgataaatgctttctgcttgtaagatatgtgatttttttttcaaaatagttaatttttcaaattaattatcaatttttttaaaaaaatatatcagtgtaataaagaaaattagtggtgcatactgcagagagtggagctcacattttttaaatgaagtttatctgtgatatcaaccaagaaatgagtggtgcatactgcagagcagcatctctgttttgttaatgctgcttccagttattttttcatggttgtgactgcgaacgcggaacaactcatgttgtggaaaatcatacaatgaattatgaggtgaagaggaatagatatttatcaaggtttgaaatttgttttgctgaatataggcaaaaatgggaatgatagaagaatttgaagcttccttgcaagtgctccgaggctttgagactgatatttctgttgaagttaatgaaattaaggtaataagaatcatcagttttgttccaatgcatgacccacatatttcctatatttttattaccattaaatgtatcctaaacttgactttttacgtgggagtcattctattcagagggttgttgcttcaacaaacataagaactatacttcgatttgcagacctcaaacaaagatgatattggcttcccttaatggtatttcttatctattatctagaatcattagattcaaaaatccatctgccttatggagttggattgcataataatgactattttctaagtacaatcttttttatatagaatcctgtagattggaattggactgcttattttgcaacagctttctggaattaatgatgttcttttttattccaatggtatgctgtgctgatttctttaaatattctaaagtaataatggagcaatattaaggaaccatgaaacaatttgaatagagttacaatctcatgtttgtgtgactttcaataaactctgttcttacaatctcatggtttatgtgcaaacactaaattcttcgtagctgtattcctacatgaaaaatactatagttggttaggcatgtatcacgataatatattaagagaatttttttaaagtgattaaaaatgtgagcttaagaaatataagttcttagttgttccactttttggactttcattcttgtccatataagatatatgataaacaagtgttgtcaacttgacttgctaggtaaataatatatgttttaaagcgtaaattacttttaactttattgaaaggattaagatacaatatctggtgaatgaacttcataatgaacagagggttcatgaagctgctatggccaggaccaatcacaacaagagcagttaaaaaggttaggcatcatctaatatctagctgcaaatttatttaaacacagaaataagaatttgaaccttattaaatattcactcaatgatagattaaaacagacagacacaaataaaggtgtggaatggatggatgtttatataggcaaagaaagggtgtggaattctctcacaaataattgaatttcacacacacacacacacacacacacatattggtagaaaaatgttggggtctatcaatttccaacaacagtagtgtgtggtggatactcacaccactggcatctctcaatgactacagcttgtatccaaacccaatacgtgaccatgtcttttctagatatgaccagaatttaattttctccaagcatgattctgtctttaaactaaacataggaatgattttgaaggaaattgtaatctgttcatctgaaggaatcttatatatttattgctttctttgaccttctcaatctgaacatgattccttttgagtttgtgttcatatatttatctttatttattgctttctttgaccttctcaatctgactatgcataatacactattacacacatgatttatttgtgacagcactcgggttgccttggtagcaaaagagtcattatgaagaaagaagtcaaattacatcctgtgagtttctataaatctcttcttttttttttatcttctatattagtagctatcatattttgatgtagtcggctgttttgatcttttctgttttgatgaggtaaaagatcctatgtgaatgatatagttaatttttttttgttgggttggtctcatttgtagtttgcaagtgatgtgtttgaccaaatgtcttaatgaatttggacaacaaatgatacggaatttgcaggtatggatataaaaaaattgttttatattgtgatttttagattccaattgattcatttcagattacccttaccattggaaatgtcttatctctaaagtggaatttataattgttgtacctttgtttttgttcattatagttatactatgtgcccataagggtatttttactgaattttgttttcctattaattttggagtttcgtttcttctagaaggaaatcttattattgctctttgtaacatcaaatttatttcttatccagcaatcactgctgcaccgatttgagtggccacataaatgatatagtagttacatgggaaaagcttatttcatttttgaataataatgtcgcttattatgaagtcataaaagttgcaaagcaatacaagttacatcaggttatttttttaagcttcattaattaagttattccaaatttagtgttcatatctctggatttgatttaagcccagtggtggagttaccattaagcagtaagcatttcattggtagaaagtatcaacaggtaatgtattatcccttttatatgctgttatttaattttgaaacattttgttggtagagaactgctcatgtgtattcaaaagccaagagggtacaagctttcaaggatgttgtacctcaactctaatgtgagtcttttggatttatcttatgtagctacgcatctgtgctgttttttttcaatgtaattctcatttacatttttcatattgcttaaaagttaggagttcatagcttctagaagtaaatcttttgtaagtgatctaaaggtttcttttatattcattgttcaattattttcaaggacgaggacatgctaaagaatctcgacgaccttatgaatgagagtcatcatagctgcagcattttgtatgaatgcaggtattgactttcagtactcataaaatgtatgcattgtcaaatatttggttttgtctagaaggattattttataaggcatgatttgtcatgtgagcattactgttataacttgaaatatttgtgtgtatgccaaaaatgacgggctatgttctgttgaatttatgttggaattactgcttgctttgtttttattttggtcgcacgtggataatattttcgtccatgattgagactgagcaaggtctccataaaggtaaggatgaaatggtttaattttcttatttcaaagatgaatgagtatgatctcgaatgaaaattttcaatcagaccaacataaatgaacattgaactgtctatgatctcaaacatgctagcaatgaaaagtgaaaaaattcttgaaacttcctaccatacatagattataataatatattatcgatactttttttgcagattgggttccctttgtgacatgggtttgactttcttatgttagcagcagagccatcaaaaaatctccttcagcattggaaggtcaagaccttttcatatattttcagcatgtaagtggtaaaatgtttaacatatttgttgtcagtcttttaatttaatttttgttatttctatggatgacatgaacctcattgcatcttgacttttgaatttgaggagaaaaagcaccagcaaagccaccttatttctatgattttcttactaaaggaaaaatcattattcttagtagtcataaattgagatgttcatgtttatgttacaggctgtgattaaaaagaagtatagacatgatactactaatgttggtaaagaaggtggctttgctcctaatatccaggtccttaactgtcagaagcgccatctgtctgagaattgtgggtgagtcatcaattatgaatgcattgagcaatatgctaattgcaacttttatattgttggaattaacattgtcaaatttgaattccatctcccatggtttggtgatttataatttttttattctattggcttttgggattgtgaatgttcaaacaaatggtatcaaagtgtaacagttgatacttgaatccaataatgctactttggaattcgcattcttttagaagggtgatggattaggttgttagttgaacttgggattatgagagatgcatacaaatatcatgggtacggatggggtgaagaaatgcacattgttgttactgttaacttatttattgcattgacatgtcaatttgacagagtcaaaagtcaggagcaaaggctgtacccattgtttccagataagaaaaagtttgttcgatagaggtgcattatggttcataggtatcattattataagagtaagggtgtggctgtaaacatcatgtctaaaagcaaataaaagcaagtcatattttcaatcattccatgatggatgttgtttagccatattagaattagttaaagtactatggccataatgaactcataaattgtataatatatggaagacctttgtgaatggcatgtgtcatggtattgctgcaggaatattttgcccagtgtggatagatttaatgaagacagtaagcatgaagtatcaagcgtggaaaggacaagcacaacaccattgcttgaagagaacactgttgaataaagttttattacaagtgacaaatactccttatttagtatttatagattatttagggaggatattttcagtgacaaatgaactcactcttgctattcaatgtaacatgattcatatataattatgtgtctttaagtattttagtaatgatttgattaataaatgtgtatatataaaaaaatatgaactctatgccaattagttactataacatagttgatcatccgtatggagtaacatgcacatgatataattgtagttcaattagaaatttgtatttcaagtcttgataagcagttaagttacttaaaagaaaaatttgatattcacaataatcttagatactcaaaactaataatgcttctgattttttcaccagaaaatataacctgaaacataattttattttaaatatattttgagatattcaaccaccagccttcacttggtttaaaatatatattgaaaaaaagtgaccacactaaaattaaatttataagatacaattaaagtaacaagtaaaaatagagagtatatattaacgtgtattctaaaataaaatactcaactaattattagaatacatgatatactaattttagcaaaataaaattttgacaatatataatatttagtggaataaaaataccataacataatataaatgatataatgtaaatgtcttttaatgataccgcaagctattcttttttattttctcaattttttcttcaatttttaaaccgtccaattgttaagttaattaacataataacatttagttaatatatttattagaaaattataatttatttctttattattagacaatcaaagttaattaatttaaattactttatcactaatatcataaataaatatatttttaataataataaagataaaaattataattaacctataaaaatgatttttgttacaataaagttttaaactacttattcactatattataatgtaaattagtattcattttcatttttttataattgaaactacaattatcatttatgaaaaatattatcagtgaaccgttaagtaaaaaaagtttgttttaaaaaagtttttaacatagttacacatcaaagaatcaacaatatttattttggttaaatatattatttatttttaatttttcatcatataaaataatggttaaataacaataaaataaagtggtgatattttaaaaaaaataatattattttagttttattagttaaatttagtcaacattatggaattttaaattttttttatttaattcaatttttacaataaccaacataataacatttagttaatatatttattagaaaatgataatttgattcttttttattataggataatcaaaattaattaatttaaattactttgtcaataatctcataaaaaaaaattaaaattttaaaacttcgaactacctcacttatttcttcaaatttttaatcgtccaattgttatgttaaccaccataataatatttagttaatttatttattagaaaattatagtttatttctttgttataggacaactaaaggtaattaatttaaattattttatcactaatatcataaataaaaatattgtttgttatgatagagatgaaaattaaaatctatattataataaaactcttctttttttgaacacatgtcgcactccccttcactctcagcttcggagtacacgtgtcatgctctcatccattttcagctttggaaaatgccgtgtcatgctcacagcaattctcaacttaggagttagcttcagtcttccatccatacctcagcttgggaaaaatacatgctttagacttccgcttttctccgtgtccttctagctttctttcaaattttgaaatttgaaatgacctccctatgcacacttccgctccatctctctctttttcttctccaccaaattcttcttctctgtttctctctttctcttcctccaatttctcctctcattttctcttttctcttatctttctcttttttgctcaccgcactcctcttatctaaaatcctcagcaaaatatacgaagacagtccattcaccagctccgaggtcgttttcatcctcctcaagtaactctcagcttaaatttgtttttcttcttcttggttttgtttcatacaaccaaagttaattaatttaaattactttaccaataatatcataaataaaattatttttaattatgatagagataacaattataattaatttgtataaattatttttattgcaagaaagtcttaaattacttattcagtatatcataatgtaaattaattttaatttcattttttatgatataaactacaattaccatttacgtgaaataattattttctatgccatcataagttaaaagttacaggtaaatagtttcttttaaacaagaatttaacatagttacatatcatacaatcaacaatatttaactttattaaatatattatttgtttttaaattctcatcttaaaaaataatgggttaataacactcaaataaagtggtgacattttaaaaagtataaatatttaaaattttattatttatatttaatcacgattttggaatttctaattttttttatttaattcaattattacaataaccagtataataacatttagttaatatatttattagaaaataatagattgattctttgttatagtataaccaaagttaattattttttatcaataatatcataaatacaaatacttttagttatgagagatataaaaattaaaattaatttttttaaattatttttgttacaatcaagttttaaattacttactcgctataacataatgtaaattagtttcaattttattttttgtgatagaaactacaattatcatttacagaaaataatgtttctctaggccatcatgggtgaaccgcttcgggaaaaaaaaaaattaaaaaaatatttaacaaagttgcatatcaaacaatcaacaatatttatttttatttaatatattatttaaaaagtttttgttacaatcaagttttaaattaattacttgctatagcataatgtagattagttttaatttaattttttgtgatagaaactataattatcaattatggaaaataatgtttctctaacccatcatgggtatacagctacgaggaatttttttttaaataacgttaaaatgaaatggttatgttttttaaatatacaaatatttatagtgttattatttaaatatagtcaacattcatcgatttatttatcagaaaataataatttgattctttgttataagacaatcaaagttaattaatttaaattactttaccaataatatcataaataaaattatttttaattatgatagagataacaattataattaatttgtaaaaattatttttgttacaagaaaattttaaattacttattcaatatatcataatgtaaattaattttattttcattttttatgatataaactacaattatcatttacgggaagcaaagttaattgtggatggatgggctgtcataagagactattatgatctttcaaggaatcatcacatcactttaaccttttatggccaatctatgtttttttaactgttttcaagagcacttatataatgaaatttcttagcaaattgttaaacacatatgttgtattcactctacaataagtaacacctatgtttcaaacaatgctttgtttatgtatttatgtgtttatattttgtgttcgctctataataactaatctctatatttatcgggttattatattttataaattttcatatattattacttcgcacatgaaatttttatgttaataatttaacactattctttgttgctatttgtagcattagtatgtaattaatttttttgaattggcagtactatgtgatatacacatctaaaacaaaaaataatgaaatttgataaatatctaattaaaaagtgaagagagtttatttcttactttttatgttgtatattttaatttataatatagagtttaatatgataaataaataaattataataattagtattttaatcacaccaacttcatcagattaataatttataatatatttccattatttaggaaggtgtttaggattctaatttagacagagtgagttacttcattcatagtttcaattttaaagagactatcccatttgactaagataatttgtgaacaagttaacataaagtcatcttccagaatgttaattagtttttttttttatagttttgttacttaaatttaatcaaaatttgttaaataaagtgttgacattttaattttttttttttggattttattatttaaatataatcaagatttgaaatattttcaatactttttatttaattcaattattatgataatcatcataatgagaattagttaacatatttattagaaaataatagtttcattctttgttacaagataatcaaaattaattaatttaaattactttatcaataatataaaaattacaaatattttaattatgatatataaaaaataaaattaatttaaaattatttaatgtatttcctcccataaccaacacaataacatttataatatcacaatcaaaataaattattttgaattactttatcaataatatcacaaatattagtattttacttatcatatatataaaaatttaaaccatttaaattaatcgcggagcgtagcggagcaacccgtgcgtatgcatgtaataaagattaatcattgtatattccttttctatctaaaatttaattaagatttgaaatttttaaactctttatttaattcaattattacgataaccaacagagtaacaattagttaatatatttattagaaaaataataagtttgattatttgttataagataatgaaaatgaattaatttaaattactttatcaataatgtcataaataatttttgagctataatacatataaatattaaaattattttgtttctgttgtctttgtaatcgacattatcaggtttagtataatctgttgaaccattacaaatgttgaatggacaatgttatttgtatgacaattctctattttttattgctgttttcaaaagcaattctctaccacaatcatttccacaatgacattttctttacaaatcaaaccctaacgccattgtctttcacattttcttggccaatcaccatctcaattccaatgccttggtaagctttttttaacttacattctatataattttaatattatagtgaattatatgcatatatcaaattataacattccataatgtattttgcagcatctacctagaaacatgtatgatttcttaattaagacaacattcacaaatattgtttttaatgaaaccaagacatgcaaaattgtgttcaaccattcacgcaaatatgttacaatcagctctggatggaaattatttgcaagagacaacagtttcaaaccacatatgtagtttgtaattgagtttcctgatcacagcagcaaccatgtgttctggtatatttgttagagacactttttgtcttaactctatcaaatgtaaactctatgttgaaaaccatgttttgttcttgtaattatgacttcatcttatattttgaatagtttgtattcttattatgcttaaagcacttaacaattatattttgtaagaatttgcattccggacttgtaagaaagcattttgatgcttgctttattagagtaaattattattaactcactatatcaagttgtctactatttatccattcaccttaaatcttgatagtaaaatttggtgtgatacatcagtgcttatttattccattcctcaaacactataatgaaacactttttatttcttagtggagtccttaatttattattagctgatacatttagcaatttatcttttactttcaatttttaagtttgcttatacaataattcttaatcattaaacattaaaaatattttatgtaaatctagcatagcacggcggagcgaagcggagccgtcccgtgcgtatgcgcacgggtcctaatactagttaagtaaaaaagaaacgaggcatgaaaaaagaaaataaaccgaaacgggaaatatattgttgagggaagtgtggaaacgagctgcatcgagaagcttccaaaacgccatttttcgatcgaagcaagcaaaccccttctaaaaccctactaccatattttcttacaaacaaacgcagtttctctctctctctcttagttcaattcaattcaatatgatgcagagactctcttcttctactactactcgctctgccttgctgcgctacggtggcggcgcacttcgccggaacgtgcttgctcccgtttcctcttctcacttagcagctaaggtgctcatttctttctctctcgctttacaaattactcttcatatcataatccctactattctttcgccgctaccaatccatttccttttcagttagataacattaattaattatgtagtgtaacttactgatgttctcgaatgacaatcacagtcacaggtgggtgaaaatgacaccaaagcagctagatggttttctattatgagctctgataaatccacaattgattcctcaaacttgaaaagggatttgttctttggcaaacgatatgaatcaactgctgcagaatcttcttcctcagcggccgccgagagatatgagtaccaagctgaggtattctatttcatgtctagtctagtgtcatgagcataacttaactttcgataatatatatgcatccttggctatggcaggttagtcgcctcatggacctcattgttaacagtttatatagtaacaaggaagtgtttcttagggagcttatcaggtatgctcttttgctcttgagtagtgtttgcatatttcttgtctgatagagcatttttgttttgtgtttcattggtgcaaatatatttatctcaccctttttaagcgctgttgtggttgttgtgtatcatgtatgatttcctgcagacatgctgcaagtaattgaaggaaaagtatttccaaaaagatagttgaaaaatccaaaaatagagaagcctgtgtcttggtattgattgaatgttatgaaattctgcattgtcaagctatttatctatgcattttcatttgcagcaatgcaagtgatgctttggataagctgcggtttctgagtgtaacagagcctggactgttgaaggacgcagttgattttgatatccgaattcaagctgataaggataatgggatcatcagtattacgtaagagaaatagctatgaatatgattaatgtttgtcatttcagttggtgctgcaacttatgttttttatgcagtgatacaggcattggtatgactaggcaagaactagttgattgtcttggaactatcgctcaaagtggaactgcaaagtttttgaaggctctaaaggatagcaaggatgttggtggtgacaacaacttaattggtcaatttggtgtgggattttattctgcttttctggtttctgatcgggtatgcatttttgtaaaagtaaatatgtgatgctcttaaatttttttgtttaatatggtatttatataattttttgttgtttgaaggtggttgtctcaacaaagagtccaaaatctgataagcaatatgtttgggaaggggaggcaaatgctagctcgtatacaatatctgaggagacagatccagagaagctgattcgaagaggaactcgccttacactgtatcttaaggcatgctgataatttccttttttgaccatcaaatttttttagttttctttattcctgagattaattaaaaatgtgatttctttttgcctatcggtatctttcagaaggacgacaaaggttttgctcatccagagcggattgagaagcttgtgaaaaactattcacaatttgtctcatttccaatatacacatggcaggaaaagggatacaccaaagaagtatggctctacaatccagatttttttagtttgatagcagtatcgatgaccgtattattttcattttaagttaagttcgtcccttctagattgtaaaatttgactttttgagcttttattaatttttgggctcattccaggtggaagttgacgacgatacagctgaagacaaaaaggatgatcaagatgataagactgaggtgacaatctgattgttctgcatatatgctgaatcaagtattttgttgaatgtgaaagtgtgattgtgtagcttctgcaaatttactcattgactcatgactgagtctttgacacgttgttatgacagaaaaagaagaaaactaaaactgtagttgagcggtactgggattgggagctgacaaatgacacccaaccaatctgggtgagttttatgatttccaattccatgatttgcaattatattgaaaatttattactcgattgaagattgtggcattactctatttatgcagcttcgtaatcctaaagaagtcactaaggaggagtacaatgaattctacaagaaaacttttaatgaatacctggagccattagcatcatcacactttaccacagaggtaagaatttaattgtctcaagtgccatcttgttgtgtgtagtggatttttttatttgttgagttcagctgaaaaacatagcttgagaacatcaatttttctccaatgtccataggagatattgtgttggttatttttattgacaaatgtgtggatgatgtttgttattgcagggtgaggtagaatttagatctatactttatgttcctgccttcgctccctctggaaaggatgacataatcaatcccaagaccaagaatataagactttttgtgaagagagtgttcatttcagatgattttgatggagaactggtataagcactttgctatctacaaccttgaataactggatggtgttctgataattttatccttcactaatgttttgcttgcttaaacagttcccccgatacttaagctttgtcaaaggtgttgttgactcaaatgaccttcccctcaatgtgtcacgggaaattcttcaagagagccgcatagtaagtagatagggcaacacacatattcttacactttacatctgaatctctcgtttaggatacactcataaaattccttaccagtttcatcttgcttaatttttttactccgtggtgcttgaaggttcggattatgaggaaacgtcttgttcgtaaagcttttgacatgattctgggaatatccatgagtgagaacaaagaggtatataattattttgaaaattgttaactgtatacagtttgctttcattttttctttaagttgtagaggagctaggataaattgaggtggctttatcttatagatatatcaactttttatatatcctatcagttgcttttgatctttcttatataacttctcttaagctctttttaaaaggatgaccttttttcctgttaaattttactgactgacttgttctgtatgcaggactatgagaagttctgggagaacttcggcaaacacttgaaattgggttgcattgaagaccgtgagaatcacaaacgtattgctccattgcttcgtttttcctcatcccaaagtgatgaagaactgatcagcttggatgaatatgttgagaacatgaaacctgatcaaaaggatatttattacattgctgctgacagtgtgactagtgcaaagaacacacctttcttggagaaacttgcagagaaggatcttgaagtataagcttttttttttagttttttaacttttgagtacttagttctatcgattaatatatatatattggtgttttttgtaatgtaattttccaggttctgtttttggtggatccaatagatgaagttgctattcaaaatcttaaatcatacaaggaaaagaattttgttgacattagcaaggaagacttggatctaggttaacttctttcttctttaaactttcaataatttgattgaacataaactcgcattttgttaaccaaatatttgttagtctctcttttgagctaattttaatgttgacaatggtgtgaattcgtagcttggttcttgtttaatgttcaaatttgttacgtatagtttgttctttcttttatcttatttcccctttcccctccccttccccttccacttctttttttttttaaaacctccttgtatctatcattgggttcatctacaaccgaccccaattagcttgggttaaagatgttgttgatgttgatagtttgttctttttgcaggtgataagaatgaggaaaaggaaaaggaaatgaagcaggaatttggccaaacatgtgactggatcaagaaacgattgggagataaagttgcaagtgtgcaaatttcaaaccggcttagctcttcaccttgtgtccttgcgtctggaaaatttggttggtctgcaaacatggaaaggttgtcatcttttttctttgatattaaatcatgtattttgaaagtttgagtagcaatgttcagtattaatcacacttactgcaggctgatgaaggcacaatctatgggtgatgcatccagtttggaattcatgaggagcagaagggtgtttgagatcaaccctgaccattctattatcaggaacttggatgtacgataaatagataatccccacttttctttgtaatgattacaaattgaaattatggtgtcgtaatcttgatggataattttcaggatgcatttaaaacaaatccagacgatgaagatgccctcagagctattgatcttttgtatgatgctgctttggtttccagtggttttacggtaaactcatggctccatattattgaatgttaaatagtttccattgcgaaatcctaaactttgtgtcttttggttgtttgttggtgtgcagcctgataatccagcacaacttggagggaagatatatgacatgatgggtatggctctcactggtaaatggtccacacctggtcagttccagtccacggtaatccggccccataccccagaaactgtagaagctgaggtggttgaaccaactgaggctggtggtcagaagtgagaggacagtcatgtggacatttttgttttcttcccgttactttctgttctttcttttaacattgcttacgggtgaaattgtattcttgaagaacatgggtattgatagtaacatttagtttttttttaaccaaagtaatatttgtagttatcctttccgttgtaattataaaacatccagcataaccaagaagtgtttcttttgcttggggaaaaatagataccataataatttggataaatatgctgtggcagcatgagataagaattatttcaatggaacagttgccacaaaaaagattatgcgttgtactttggtccaataaatctgttctgtttttggtgaatccattaaatcaaatctggacttttgattcctgcccctcccaaaagacatgtaaagacataagtacccttcactaggcaccccttcaccaccattgcaatcggacacaaattggctacaatcactcccaccagtgaaagcaccatcactaacaatgacaacgttagaaaggtagtagcaaagaagggaaagaaatgggttgcaatggagaagttagaagttagtgtttgaaaaccatcgttctcagtgacgtcgttcttggtgatatcacctacaacacttgttgtgttgacaatctcactatcgttcaatcagatcaaaatggcaaaattttgcacaacaaaagattttctataatagtatgacaaaaaaatctttaaaaatcacattacctatttatatcttgctacgatacaaaacttgcttactaataactttacaaaatgttaatttttttgtgtaggaagataaagaaattttaaagagttcatatgtagtaataagtaggagagatagttgtttttcaaataatcataattaataggttagttaaaagtgatggaaagtagataattaattatgttgaacctgtgcaaactcgtgtaagtttgcacaagatagaaaaatctttatatgaatactaatagccacaaaccaggaaagtgttttgcttgcatgacctctcaatttgaccatcacaaactagacacaaacttatccccttaaattcaaatttataacaattgtttgtaattttttgcttcaggtttgaaaagaaaaggatcaatggaattggtccacaaagaggggccatgttcccatcttaatctgagagcttagttagccattgatgtgctgaatctggacaagcagagtagattacatcgagtccaggtttaggcgtgacaatgaggatgggaggaattaccattctatcgtgtttcaattgttaatactttgaagtttgaactatgttgtggtggttgatatagggacaccaaagaaggaccatacacttgcctatgacacagggagtaacatggactcagtgaaaactcaactgcattgattgttacccgcagaaagatgcaaactataatagagtggagtcctcatcttattaggaagttgaatgtcaagctccacagtacactcaactgaaatcggttataggaaatgagccacgttgttcatcactcacacatccatgcgagtacaaccaatactatctggacgattcccagacccacaactacttcagccaagagcggctcaccctgaccgacatcgacatcatcgaggacttctgcttcggttgcgactatctccaaattggcgacctcgatgagtgttacgccaacattatgggcttcggcaatgaccctctctgttgtgggacaaacgtctgcaacttacaacaacaatattttctcttactgtctcccctccacaccaaaaaatggactagaaataaaaattagaatggggtgcaaagattataaacatatctcaactttgatttaataataaaagttgataaagatataggcaaatgaattttcaaatttatgagatcattcataaagtgcattcaagtattccatctctgcagataaaaagagtattacatgatgaattgaaggtcgataaaagtatggaaaactcaaaccacacaatgtacgtaatttttttaggcaaattaaaaatgcattgattaaaagacacaagtgcaaagagtattacatgatgaattgaaagtccatccaagtatggaaattttccaccgtcccatctcaaagaagaaaacatatattatataccaattaccaaacaacacatccacctatagaagaatggtttatacaagtaatccttgcatataaaaagagcatggttgtggcaatctttcatacacttttacttccttacctattagctaacatggcctggaaatcttattttctcttagtcattttcttgtttctcttctccctggagaacaacattgttttaaaaatcacgttacccatttatttcttgctacgatgcaatacttacttaacaggagctatacaaaaaattaagattttttttatgagaagagaaagaaattttaaagagtcatatgtaataataaacatgagagatagttgtttttcaaaaaattatgattaatcggttagttaaaaatgatggaaagtgaataattaatgatgtctaaccagggcaaacttgtgcaagtgtgcataagatttttctatcctatgtaaactcgtgcaaatttgtacaagatagaccctattataaatacaaatagacccaaaccaggaaaggtgttgtgcttgcatgaccctctcaatttgaccattgcaaactaggcattcagtgcataaagaaaaaaaaaatcaatgatcaaaatgaatatgttatgaacaacattcttttttgttgaaaaaattgtgctgctttatgaagaaaaaaaagcataaacgaagaaaaatgaaatgtattgtgttccttgtgagcatgcaaaataatattaatccaaaaaattaacaacatatttaataataatttgataatctttcctcaggggatatcctctccctccgtaagacattgtagtcaagtattcatggcaatgaaaatgagttttcttggcaaagagtgatgacttatgccacgttaccctcaaaacagaaaataattttaaattaccttaaaaaagagtttggtacactaaatggtaataatacattcaagtaatgacaaatccatgggcagagaagcacatttatttaacaattcaatggttgaactttattatacttcatacattattgacaaactatgcaattacttggtgcacaactcatttgctttgagtacttttagtggtataaagaaaagtgcaaataaaacaccaacacttcctttgtaacactattttctacttgttaaaattcatgtaggtcctactagttttggaacgaaacccactaaatgagaagagacttgcatatttgatgggaccaacataaatttcacccaatagaagagagtatgtcaaaagaaaaatgttagtgttactagcatttttcatgatacgctacggtattaatggcaatttgggctgcaacaacacattcatacggcacattgcaacatcggtaagcgaggtgtctttcaaaattgaacacccaacccaattggttgactgagttgcatacatgatggtatgcaggacgccaaatttgatgattgaaactacacttcagattatgataataaacccaacattttttatatcttcatgcaacgtgcactccaatgctatatcatctatagattccctgcaggaaacacaaatgtccaaattcagcaaagtttaagggtgatgatgcaaaagactgtattggtaaaagtcaccccggcagcacagacgcatttgatacacgggaagaaacaattggcgatcaagagaatgagaaattagaaagaacaataattattgggggtgaagtttcaccctaataatagggtaaaaaaaatcatcccccctaaagaaatattacttctataaaactcacttccttaaaaattcctcccaaaaaattctcccactttttaccctcaaacaaaacccaaagttattggaccaaccagttatgaaataaactttggggtcttcctgattcatttttcaggcaatgacaaacaattgtgtacttaacatgacaaaggcatgttagtacaattaaaagttgaaactggtgataaaatcaggtgacatacagactaaaaaatttccatgctcaagagagattcacctatactgattagattgaaaaccagtaaaggaatcatcttaaaatccaaaacataagatttcaatatgaagcaaaaaagaaagaacaacttctttgaaaagaacaaaacagggtgttccccaagagaaggaattctatttgaatgataggcatcctctttggatcaaaggataccttctgcaattggctgcttgatacagtattcaatagattttgaggtacctttgatgactatgaaagtgttttgaaggtactgggttacatttcagacttaagcatacattcagtttatacaggcttctatcttgtgaattttaggcatagtagaatataaggagctataagaaggaaaaagagaattcagtgaaaacaatgcttttaatggatttttttttttttttttttatccaactaactatgaataaaagtaggaagctatgtttttctgaacataatacagtaaatgacttccaaattgacgggtaaaaaatattccttcagaataataatgtacttatgaagaatctatgcttacctgctgaagttctcaaagatttccaagtcaggatccccatgagtagaattgttaagtcttgaatcacaattatctatgctagcatccaatcaacttagtgcctgtagatcaaacattgggtaaggtgtgttgatgaatgatgatataaaaattacaagggataatgaaccaactagtgaaaagcaaaactcaggcattactattgcagaaaacaagaaaatatataaaggcaaagagaacaaatggtctgcctcccaaggactagaagaaaactatactccacccacatgcctcagcaactcctcatttacattgatacaaaacagaatgcctaactcaacccacttacccccctccctttagacctatgcataactgctactttcgcataacaagtttgagaagatgaatacacctgataaattaacagcatatatagatttatagagcctctttgcatgatttttacattatgccttatttctttgccagtctcagcccaacctaactagctgactatatcacttacagactaacactaataggcatctaacattgtcctgcacaatagttgcatgcactcgaataccaaggaaggcttattagattaggcatttcctaccaagcacaataggacagaccaagcatagaaaacatagaaaaggtatcaaagagcaaatagcacaacataccaaagctacttttggcagaaatcatcatgttttccaagttttgagcagcctcagtcatgccttgggtgttgtatgcctggatcatgcaagcgaaagtgatgttatcaggttcacattttctttctctcatagccaagaataactcgcccatcttttttgagtcaccaacctgaccataggcactaattatgcaattaaagaagggagtatccaatactacatcagaattttcaacatgcctcatgattgagtcaactttgtcaatgcgcccaactttgctataagcactaacaagtgagcaataagttatagaattaggcttcactcctagatgcttcatcttcagaaagtgttgatccattttctcaatctctccagctttgccaaacacctcaatgacagtattatatgtaacgatcgttggagtgaaaaacctcttctccatgaaatccataacagtcttcatcttctcatacatgccagcttttccataggactttatcatcgtattgaacgtcgttatgtctggctttatccccattagctgaaattcatcataccacttctccatcttatcaagttgcccagcatttccatatgctccaacgaaagaattcagcgtgaaaacatccgggtgggagttgcagttttcaatcatattattcaatgcatcatccatctgttcaaacatgccagccttaccatatccatcaatgatagaattataagtcacacagttacattcgatgcccagatacgacatctctgctagaacatgttcaatcagatcaaaacgacgaaatttcgcacaacagcggataagaatagaataagtatatacatccggttcgcagtcaacaactgatttcatatcttcaacagtagaaaaagcctgatcaaggagaccactttgaccataagcacttgcaagagcagtgtagacatcaacagtaggtttaaggccttcagacaacatgatctcaaagagcagagaagcctcttcaggctgcctgcacttgccaagcatcatcaaaagctttgcatacgtttggcatcgtggttgataccagtattgcttacgaaggagtgcaaaaatctgcaaatgataataataataataatcagtcataattacttgtttcagagttcagacacagaaaatgttaatcctaaaatcaattaattactggcctcgagagcggagtgcgaacgacagcgtttgatggcgtcgtcgagggcttcgagaagggccttgggccagagctgtttgtgggaggaagacttggccttgttctgaacgcctctgatggcggcttcggttcggagaatgcggcacaagtccttattggggttcttcaccaactccacagacgctggtttcgaactccgcttcaacgactccacccgaaaacgacgacgtgtctttggaggagtacggttggttgaagaggtgaagggtgtggcggaggagatggaagaggaccatcttaacatcattggagatagaacaagagtcactcacgaccatcttacaatttttttaatattcgcaaatatatgtggatatttagatgctttaactataatttttatttattttaaccatttctttaaaaaataatttaaaggtcaaaactaaagttatttaaacactcaacacaattatattaattattatactttattttaataaatttaaatattaaaatgcttcagtcccatgaattcaaaacaaaacttaataaactttagggagtgtttgttcattcaaatcctttttaagaatttcgagaaatgaggagatcaaaatatatatttttacatttatttaaaggtaattgaaaaatactctttcatatcttttatttttaggaaagtgagatattcatgttaatgttaatattatattgagatgattctcatgaaaagaggatgaaatataaatttttaagaaatgagaatcatattaattatgtaaaaattctattataccctcaatataatatctaaatatataagttagtatttcagattttactgttcaactttgataacaaagggtgtgaatttaaagacagaagacaagtatgttgcagttgttttttaaatttattttttgatatgaagacagtttatcgattgtgtttttggtttacttggagtttggttaaagttatgttgtatgtgtctttttatgttgtttgtcttttacaagggtattcgtttctttaatagtaaaatgtggttaagaaatttattagaaaaatttataagattcttcaatgttatttgtaaactgcagtatttgatctcctgtattattgtgtaggtgtatataatgagttattttatatattaaaaaatattttagtaatataacatacatttttagaaaaaaataatgtgaaccaaacacattttaaaaatatttatggaaatctaaaaaaaattctcaatcaaattttaataattaaacaaatgtatttttcttgaaatatccaaaaatatcattctatctaatctaatattcttggaaataacattcccaagaatgaaaaaagattccaggaaccgtcctcgaagataactcaattctataagttcaaataaaagctaataaaatataatatttaaatttcacaaatccaaaataatttttaacaaaaatatttaaataattttattacaacaagtatttaacgagtatagtaaaacaaatactttaatgtatcaacgagtagtttaactcaagtgatcgagcaaaatgtgaaagttgttataaatttcttaagattgtgtttgattcttacaaataataataaaaaacaactgatatactttaatatctgtctctaccattttattaacaaaaataaatattgcttaaattattcatccatacttatttagatatttatcattgtgtttatcaagtggattgaaaaaaatccgtgatctttgatccagtaaaagaaaatgtctatcttttatctgtttatatatattacaaattttatccacaaatatatccatccacatccctaactgaaaaagtagccagccaacaatggcttgatggtaagttctatgctgattataacacaatttgatatattttccccaatatattcatttatcaggcaatgatataaaataacaactgggtaaatgcattgaattcggttacttttttccctgaaagttgttcagtatatggtcaatggaaatttggaataatctaaattgtggtgctgatgtattacaagattccagcaacatgccaaattgcctattttacagattgtgtagtggataaaggagaaatataatggaggaaggaaaaaactattatatgtgatgtgactatatcgaagaggttttctttagtattttaaggttgattatattttcttgtctcaattgaataagttaaattttaataattactcctgtaattaacctttttggcaaatgatacgttctatagtacttataacataaaatattagaataattggaaggatattgttagatatgaaatcattcattagttttcaatcaatagctttcatcgatgctaacatttagtgcatatattttgaatcttgtgtgctgaacttaaatatatttttcataaattaagccctctcatggagttatcttaacaataactatgcttacttataagatttacatcacgttttggaaatgaaatttgtttttgatgaatgattatgcatggcatgataaatgtattttaggctccattgttttacgattgtctgatctattttttgcattgatgtgtgatgtgcttgacatcagttttaccaaaatttctattgatgcccaagtcagttgtaatttgcttaatttctcatgttgatgctatctgcatgtagcttttagctccttcaattttctcctaggtggttgaggctttagctaactaatattaattgaaaactcataatgccaaaggagagaggaaatgggtctttgttacatgatagttgtgttggaatttaaatgcttagacataagacatgcacacactattatgatcatcatgtggtttactggaaaaggatggatccagtcttcttggtcatttttttttttaaatctttggctcacaggatattttcaaccaaagttcttgcagagctggaaaacgtggtatgactctccgaatttgactttagttggttttaaaatggacattttgttaagtttttgatacctgcaggtatgcaaggtcccatatctacagctaatttctaatcccatatggcattctcgggcttcgtcatggacactctacatggaggttcctcaatctattcttcgtggtagccaagccaaaacatcagattattatgagaaaaatgatggcaagcgtcagttttggactaaggtggtgatcaatgatgattgcatcaacgttaaagctgaaggttctccaaatgtcgcaggcctgttcaagggaaagtttgaggaaacccattcaataaacaaatataactgcaacttagctgatctttctgtgattattttgcagcaggtaaagcgaaaaaatatttgatgtcattgcagtgactttcgtattcctaagtggagaatttgcatatatgtgagtcttacgtgtaattatacagcaagcttattactgcaattgaaatcatgcaggttgcgagccaaattattaattggctctatcaggaagctatgatggatgggataaaagcaaatcgagacttcttatgcctatcttttgagctggagcagggtgaaacacttggcctggttggaagggttgatccagaaaatagtgaagggtgtatctcttggtggttggtcatggaggacagttttgcagaggagcaaaagcttcatatgagcatcactgatggtgcatctgaatataggaaattcctaggtcacttgtctgttgatttgttatacgcaacactgatcgacttggttggcttgtgcattggtggaggcggccaatgaagttgtgtgaatgtttttcttgcactttgtcaagtgaaagaagatctaggactaggaggtctcttgtgcaacaatggtatataatttacgtacactacttctcaactgatttaggagagaaataaaagcatgtttagtgtaaggtaaccatcttttaagtttaagatttaagtttaagatatgatatttattagattttttaacaaaggaattgaatagatttcgatacaaagaatgagttattgtagaagatctcttaagatctggacattgttcaaaaaagaataaattttcttcttttttctctcttcttaaaatttcaaaatgagatctaccattaaagaaaaaaaaatgaaaaagattttgagagatctttaatcctatgtgatactatgagatctactaaaaaatagtctaaaattctaatttgagatctatcaataaagatgttcaagaagatgttttttatattaaatgagatgagatatagaaaaaatataaaaattttttaatcatgtgatctataatgtgatgtcataactcataagtacgtgatttcataagtaaaaatagactgttaactacaattaatgtatataaaaattagaagaagaaaaacttggtccggatcccaattattatgttatgtaatcataatggaaggtaaagggaattcgtgacaaaagatgaaaaaaaaaaaaacgaaagtaaaaaatttataaaagcaaaccattcaacaattcatgataattcagaaaccaaggaaagaagcactgaacagtaatagtataatgaaattgaaattgtttcaatcatacttacccatcataatgaaactgaaaagtaatggtttcgattaggagcgttgtaatgacttggcataatttggtggaaaattaacggtacttgacagagttaattaacgcttttgcccaacaagaaaaaatggcacaattatgaatgagtaaacatgtaacgctagtcaaccgtgtgaaccagtcatcgttggaaaacacgaccagaccaccttccttcccacttccacagttcaaacaaaaaataaaatcaatttgattattctattttgtcgtgttcttcttaattcgccggttccgtccttttcccggtctgaaccggtcagggtaaaatgggcaaacacaccattcctattttgacctaaccaacccatttctcttctttgatcccccatttcttcttttattaagttgtgaacaaggaagatatatactccaatcgattagccttctttccatttttcttctcctctctctggtaaccttcctctcctttttaatccaaattatcattcttatattttcaaggatatttttgctgtgattgcgtgaatttcgatcaacctttgaaacatcctttgcagcgacttttatgtctcaattttaatgtcaactttctgtgctgggtcgttcaacttgcatctttatcatttgatctattgtttgagttgatgagtgaacttgtgtgacatcatagtttctgtgagagattgcatatctctcaagcttctttatttgataagaagctcgttgcacaatagaatcaagagtgaaatcactggtattaaactttctaatttttcttcttttccgttatcactgatggattttcctgtgattattgtgtagattatgataatatgttttttcgaatgtattttgttttttggcatcagtttgtggaaaaattagggcctgactgcttactaaatagtttgataattattctctctactctctagtctctagtctctagtacttgctttgtcttttgtaatgtttctgtgttttggaggtttatgtggagtgggggcagaggatgaaaggctgtaagcctgcaacttttagcagattttgaattttctcaagttcctcgctcatttgtaacattttagtatttaactatttgtagcataacaaagagtatgtgataatcatgtgcagtggtatataatccccttagctagttactgactaagtaaatattttttgggtaggtcaccaggctctaacataaaacagaagcctttgtgaaaaagaaaaaaaaatgctccctccaccacagcagtcacgggttggaggactacaaacctctctatctctagtttcttcggatccccgcctttctcccgaggagcctagatcaaactctgacaatctccgtgaatctcctactgaaagtgccagttctcgagaaacttggcctactgctgatgcaattgctgcaaagaagatggagaatggaaaagcagagatggattgtcctgatcagttagttattcgccgtgtttctagtgcagacaaaattagtcttcaggacattgcaagagaacgagttgatataatatgtgagaaaatgcatcttttacctgacgaatttcttgaggaactgaaaaatggacttcgagttatccttgagggagggaatggctcacagcatagagaagaatttttcattttgcaaaagcttgttcagagtagatctgatttaacagccaagacattgataagagcacatcgtgtacagcttgaaatccttgttgcaataaatactggaattcagggatatttacatcctagcatcagtctatcacaaacatcactgattgaaatatttgtgtacaagagatgcagaaacatcgcttgccaaaaccaactccctgctgaagattgtacctgtgagacgtgcactaatggcaatggtttctgcaatctttgcatgtgtgttatctgcagcaagtttgactttgaagtaaatacgtgccgctggattggatgtgatttgtgttctcattggactcacacagactgtgccatacgtgagcaacttatttgtatgggcccttctgcaaagaatggagcagggccaagtgaaatggttttcaggtgtcaagcatgtaacaggacttcagaacttctgggttgggttaaagatgtcttccagcattgtgcaccatcatgggatggagaggccttgatgagggaacttgattttgtcagtaggatctttcatggtagtaaagacccacgagggaggaaactttattggaagtgtgatgatctcaaggaaaaattgaaaagtgggaaagtggaatctaaggcagcatgcagggcaatattgatggttttccaaggtacaagttttctagtttacctgcaaattgtagttttaaagtttctgccttgacataggctacacgcacatggatgcacatgcacatagtgtgaatacaacattattgtttttggcattttttttgggcccatttactatgttcatatcatagtagtatttgtttgtactgaaaagttgaaatttcattaaaactgtgttaggaatgattaaaaaaagaagcttttagactatactttgaggttatctccaaacttcctgctttctcttcattaaaacctgaatttgaagatatctaggaatgaaattgtgatttgcatagttaaaaacatgtataatcaataaaattaattctattactttattaattatcctttcttcttgttttaaccaatgcttttcatatatgaagagcttgaactggactctccaaaaagcctggaaaatgcagaaagtggaaggctgattgctccccaggaggcatgcaatagaattgctgaagtggtgcatgaggctataagaaagatggaaatagtagctgatgagaagatgagaatgttcaagaaggctcgcttggcttttgatgcttgtgaacgtgaattagcagacaaggccagagaagcaggagaactgaaaatggacacgcaaaaaaagaagttacagattgaagaactggagagaattgtgaggcttaaaaatgcagaggctgatatgttccagttaaaggctaacgaggctaaaagagaggcagagcggctccagaggattgctcttgccaagtcagataaatcagaggaagaatatactagcaactatttgaagcaaaaattaagtgaggctgaggctgagaagcaatatctgtatgagaagatcaaattgcaggagacttctcgtgtatcacagagcagtagtgggggtgacccgtcttcaatgctgatgtattccaaaatccatgatcttctctacagtgttcctccgaaggcagacggtcaatctaatgagtcccaccctttcagaacaaacccatgagtacgggttttgtatgttataatcttttacatattatagcaatgttattctgttgcacaattgatgaagagttagtctaattccattaggttcaagcattgtaagccttttgtagatcgaagaggtactagtaactaaaggcttaactcagattgaaattcggtttgttctatgcggtgtatgtatgaatacgcatttgtgacaaattattgattgtttcttgatttgtggaatctaattagttagttagtcaatatgtttaacattgtggtgagtgggttggatcaggactacaggccaaatagctcattgtggagacaaagtaaaagtaatattatgttattgataaaacgaaacgacattacagctgaagggcaaagtatttttctcgccttactggaaaggtgggatattcatctttttgacagataaggatgggtttgtcacactgctgttctttggagactccttgggttttggagctcggtgggaaggcaccatgttttcaaatgtcaaagcagcactgattccgtggcatcttatggaagagctttggcacacatttggtgtgacaatccttgcattgttgacaaacaaacctgttctcccaccgttggtgatgctgatcaccctgcttggaacgctagagggaaccacagagccatttggaaaatgtaatagatggctgagcaataatggtgttggaatagaatggctgagtatgaaatcatgaagctggtctagagctattgagaattgagatagttcatcatcatttggcattaggaatgtcaaatcattgttttgcagtgagttgggctggctgttgagtattttgaggaggatgacaaatccatagtaggaccgacttctcatgtcagtcatggctacctgcaggtcggtttggttgaatgacattgtggactgagattcaccaatgacaaagaatgtaagaaggatcacaaaccagatagccattagggaaatgatgagattttgcttgaatgtttactgtttgtgattgtgtgtgatgaatgcaatgacatctcggtttgcttggtttttatagccacgttattgtttcacgcttatgttgccacactttcttcccctttctaggaatgtaggcgggaggccggttgtgcatgatgaggtacggagaatgtagtagttagccaaggaagctgagattgttttggagtttagaggaaggtgattttttatttatttatcaatattcagtattaaaccctttttagaggaaggtgaatctccactttacatttttctgttttacatgaattacctacccatcaaggagtgattattgtgacttaagcctcgaaactcaacgagctatatctgagtttgacccattttcttattctactatgaacacagtatgtaaggaaataggaataaaaattattttaggagaggaatcctaaagcgatgacagatgtgttttaagagacaaagataggaaatctttttcagattttagctacgaaaacagctagtcctaggcacagaactcttcgttggtaacttttaacttcagacagaagcagtttgttgagttaaacaacatgtcaatgtcatattagaggagatcaggcgattgtacaggtgtctgcagggcaaacataggtttatcaaaactttgtatgaaaaaaaaaatgagtaataattttttgaaaaatagtaacccatgtcccaagagtattggttaaaaaattaaaaggaaaaaaattattgagatatacaaattgtgtttgtctataattttttagttttttctcttctcatttttactctaccactagtaatggttcttcgaacatcgaagtctttctcgcttctagtcctaggaagatcaaacaaattgtccccaatgatataatttcttagacgaatcgcgccagacacgaaattttccacaaatctagttcgcctcaacgttaagcagtgaacattacgcactcgacaatgaacaatgcccgtccagtagcaatatgcagggactccgttcacgctaggcccgtgttttgcacctgtcaaacactgtacaattcaacatctgcatctctaaatatgctcaaaacattgcacttgtgtcgatttgtttttgacgatgttgtagaggaatcataatcaaactctcttcatgaaaaatatagatctatattttttctttaaacattgcacttgcgttgatgttggtaggacaacgcgtcatcttcaactttaagtccaattttgtctatgttccgcgttgaatcaagaggtatattttttctatatattttttttatatataatcaagaggtataatttctttccatcgttattctatttttagataaagtgataatcacttcatattcaagtcaagtcaaaattaaatctcaaatattgattaagaaacctaagtgacaaaccacttataccaataactttttgttgttccaccttgaatctaatcaaacaatcttcatgaaaaatatagatctatatttaagcttttcacggggaccaagatgacttcaatcacatttctagagtttgacaaagaggagatataaaatttgaagcttctcatcactattgttcatcttccctacattaaaaatccaagaaaagagaagtctattcacgcttttttctttcatttaaaccattgaaatcatgaatcacaaaaaatatataatatgaatttttttctcacaatattccaccaagttaatgctttgaaacatgttaaaaaaaatctataaatttggatatattgtagatttatcaatgatcttttaaagtttgcatcttaactttattttttttaaacgttttcatctcacaatatattgtaataataattttttttactttcttaattatttaatttaaatcatcaattagcattgctttaaattagcaagttcgcattaacatatacaattagaatcataaataaataacttaactttaagaaaataaataagttaatgttgattaatgtaaaaattaatttttgtatgttcaagaatgattttcttattaatatctaaaaaaagaatgatttcattaatgaaaaatccaagagtattaattatggttaaacattttaaattcttttaaatcaaatattaaattatttttaaatgttttgtataatactatttttattttgttaatctgtaccttaaagttagaacactcttataaaaacgaatcatataaatttcatcttcaatattcattctgtattttaattacatacttatctcttaaaactttttcgccaacatattttaattctttgaaacacgagcatgctctaaattgattcagctgttgaaaacttcaactgccacttgttttaagtggtagtcgtgtctccaccataggtgggggacaccttcttacccaaatggtctccaaacgctagctcctatatgagtaaaacaaaaataaatttgaaatcttcaatttgaccaagagtcaatatggtaaatcatttcaagacaagcttggagattataatctttcatgctcaatttataaagccatttgcatcagcatgtcctcttcacacccattattataaaatataaacagctaactgacactatattatataagttcaaattttgatgaatatatcaaccttacagaaataattaatgttcactagctagctaatattgagggttacagacgtttgcaaagataaaaatcagcagagcaaaggttgctatcaagcttggtcaagacaaggttgtgtgtcaggaaaatagataggtgagctaatttataatgtcttttgtcttttatcagttttgtctctattttgattaagttgtcaacttcagacttgtacatgttacagttgtcgattttatttaggaagaattatgaaaaatatgacatttagtaatatttataaagaatcattctaataaatcattttatagcaacattttttttactatataacccttttatttattaaataaaaatattaaatattttgaaatattaaatatttattttttattcagtgtttctttcataaaatcttaagaagattaatagtagcgagagaataatatgtcgttattcatttatgaaaaattgaacaaagacatgatcatattgatataatacatttttaaatccaaagtatataatcattcaacttttacttaataaatagttaaatttatatttttaatatgtaaaaaatacaataaattagtatcataaataatttaatgataaattaattcttaaacttgtaaattaatatcaaattgatttttaaaaatatatatttttgtgaaattagttcttaaacattataatttaataataaaattaatttatcatatattttacatattaaaaattgaatttatttttatttttcataaattaatttatcatggaatcacatgttttaagatgaatttaattatttattcaaataaaaatgatcatcttatttgattattgtcataattgtgtctctctagctaactgggaatagactagctatgtagctgcatactaaagcatagggcatagcttattacgctgaaattgaaaggagcagttattgtgcatccgaggcagactacacatgctgttggctgccatctaccactgtattcagatttcttgttaatgtttggtacccgccttgtatcaaacgtctgatgttaccttacgtagttttattcttcaattttctctctctattctctactgcatgtttgtgattcactttttttgaatgtgcagtatcccaaattgaaagttagagaccaatttctcaagttactgaaatttatttatgttgtatttgattgaagagaaacacattagaaatgagttgaaaaggacgaaaaagtgattaagattatgttaacaaaatcatttcgttgaatgtaatgactgttttctcaaaagtaattaaggaaatacttctttgtgctcaagaacgtgcatgtgttttctccaatgaacaagtattcaaacatgtactaattataagaaattcatagtttgacatatgaagaagtattgaaattttttttaaaatttgtgaatcttacataaaaatattttggtgcaaaagaaagttgaaatagcaaagaattgatgagaatctagtctcagaagcgttgttcacttgactgaagggtgtatgataaaataataatggatcatttttgtattataataaattatattacattttatatgaaaatgacaaaataatgccttaaaaaacatatataattgataatcaacatgtttggattgacattgaggcatcgtgtctttatcgtgattttttttttttatacaaataatagtttcaaccttgaacatggatcgatatgaggcagttaggtgtatcataaacacatgtccaaacacttacatatgtttattttacataatcgattatgatattttattttatttttctcttttctcttttacttaatttatcttaatttttcttaaatcaaaccaacaataattttttatcacttacatatttttactcttattttatttctctatacaaaacaaaagaataagcaatttcttttgggccatttttacatttttatgttaattagggttattattggttgcaattttcagttatcgaaatctaattaaggaactaatatattctgatatattatattatactatattatatatatatatatatatatataagaattaagctcttaatcacgtacttaaaaaatataattatcttacgaatactatatcatgttagtgatttgctttttcttttaatatttattttataagtataaaataagtaattatattttttaagtaaattaatacaaatatgcatctaacaatcttaaatttgcctcctatagaatgaaggacctgcgttttaaaaagttaagtataattatgattattaatttaaaatagttaaactataattaataattataattacattttattctttaaaatataacatgactttggatcaaactaagtctttcattcaaagcaaaattaaatatatttttgtcccaaaaatttaagttattgttatttctggtttcctaaatttaaatttatattttagtctcttaaaaaatattctttttaatcattcttaattgatttttgactattcagatgcattgtgacttttttacttcaggggggcattttttgtaattgaggaactaaaaataataaatttaaatttaaagaaccaaaaaaaatgatctaaatttgagaaaacaaacatatttaatctttcaaaacatgtatttaactattatgtatgaaaaatttattgaccttcacaactaaaagtcatatcaatagtactttttaattgatttacattgtaaaagtctttcattgattgtgtataacagtcaacgaattgaccataaaaaaattgattatttagttattttaatctttttgggatcaatttgatgatttaaacattttggttggattttgaacatttctaataaggtatctattttcttgagtacaaataattaaaaactacttaaattttcttacttgaagaacatacatatacattgacaatgtaaaatattatcattcaattataaattttcatgtatgataaatttattaatttttattatgattattttaaaattatgtggttgataatattgtataatcattaaactattttatttatgtataagataaattgtactaattttttttaatgtgtatttatctcttttttttttttacttttttttataaagttttatatttaaataaatattcatagatgcttataaatatcaatactgtttagaccaaaaaaaatatcaacaaatctacagttgctcttcagttattggattaggatgatattcgtatgcatccatatgcagcacttatccaaaagataactaacttcaagcatttgcattgggatctgtccttcaagcatgatcataattatagggaggacaatcaatatgcccgactggttggctcgacaaggttcttcttcaacatctgttattggctgatgtctctaatgtttcttttactatttactctttagtttctattcttctgtttgtatattagtttccattcatagaaaaacaaatatcaataaataagttaatatttataaaatttgtgaatatttgtttcagatatccacgtggatagcaaatttttcattcagccagacaaatgaaatctctacttacaattatttccaacatgaaaattagacgctcactaaagaaaaatatatatttgcctccctcccctccccctgaaagctagagaccgcagtcattaaattaaccttgaaacttactctcttaacctatgattaaatggttatatatatatatatatatatatatatatatatatatccctacctttgtccacaagtttctttaattattttgctttggtgagtagactataaaacatgtgtccttaaataatttcattgacctatatatttcttaattcttaaccatcactgaattacatcgaagagggaacattgattgaatcgttggattattatgtaacagccgtacaatactaaatttcacattataaaatcctcttaatcaatacaaacatgcggacatattgtagaaagatttgaaggtaaacggctttgtttggtagttcttgaaaaccacgaaaatggcgaccaaacctaaattaagctgtgtcttaaatactccccccctccctcaataagatggtttctgtttaaaataatatcacataaagaaaataattattgtacaaccatgcaaggaaattgtattaaatttaaggcatttgaaaatagtttcttcttgttactattcattaatttaaaaccattgactgaagaaaaagtaatattctagcaagaaaaagaaattaaaaaaatagattgaaagattataaattccatgtctttaatgggttaaatcaataagttacaaataaaaggtgagaaatcctgtagctggaataattaggaatagaatgcatattcttgaagagaaatcttcctagggagaataataggcattgtggtggccggtgggtctatgcccaactggattttgtaattattgaacctacacatagttactcgatgtgccccatacagtaatgcacttcccacatgaacatagtacttagcttcaaaagatgaataaattaatatagcgtggtagtttccatggcaagaagtgaaaagaaaagttggaaagggaaagtaacaaagcttccaatgccattatgccgaagtggattacaatgaagcatggccctacaagttttaaccatctaagagttgctttgatgattggattaattcttttctggctggtcactttctttttgaccctcaagtgttctgtttgccaatcttataaaaatattttcttttctacaacacgtatatcaatgtaaaaattataattatagtaaaagatgtaaaaattataattcaaattcatttaaaaatacatcttaatcactattgacaatttaaaattaattatatcaatttataaactaaacggctcctaaaaccgtaggttttactttctttctcgtaaaatatacagccactacttgcctctggctatatgtcaacttattttcggcggaagatattgtttatataataacgttgaaaaatattatattattgtgaataaatattttatgattttacttgataaacgtacttcatggtaatggtgccaaattgccaactatgaacagcccaaaaaaaagtaatggtgccaagccaaattggcaatgatgatcgaacactccccttaaaaaaaacaaagtaacggtgccaataggaagcacagctagttcagcttgcatcatcatattccaatatgttgttatatcacccgaatcgaactgacctgcattcataatacggaattttgttttttaccctttatcacagaatttaaaaaatggtgatttataacttttttttagtatgaataagttaaatgctaaaaattacaagaaaatttatatttgtgaaaaaaattaatacttaaagacctgtttgattttgaggaaatgcttctgttttcattttctatttttagtttctttaagaaataatgaaatagtaaaaaataacaaaaaatattttacttttttctttttataacttttgtaaataagaaatataggaaaataatatggcatttttataattaaaattaaaaacatatttttcaaatcaaacaattcctaatttttcaattctacattagaaagtaggacacccccctcccttccagataatgagaaatagatgagtttttttttgtttttttattttttatgaaagagtttattattatatttagcttaacaagaaagtatgaatacagattaaatttgtttatagatctgactataatataagaaatggaaacgctttattttattaactcaatccaaattgtgtggatatgcacaaagtatgttgtacacaatatattttcacagcaaaaaagaccattcaatcaattgacttttcttttacagaaataaattgacttacataaacaataacaaggctatccagttgaacttacatatgtgattagcatatgaaaccaactcgtcaaggaaatattcaagctcatgtaatctcattagacaataatctgtgctgtgtctgtctaccactcttagctaggttttacttatgtaggtaggtatatatactatttcctcctcttttattgaactctatgaaaacttcttctctctgagtgaaacttatacattcttaactttccaacataacagtaccgtataacaggttctccttagcatcattgattaatgtaaagattgtaatattgtttaagcactggaaatgttctggatcgcaagaaaaagtggcatgacaataaacagcaataatttggctgtatgtaaaacagtgttggtagttactatttttgctagaaatgacaaatctcaccgccatagcaaaaatcataaaagtgggactccactttaaaacttaacctatttccgaaaaaagtatttctcactaatcatatatcatcattaattaataggcataaccctacttccatatcccacaatgatgattaactctcaaggcaagaaattcacagatctaaactctcaaactgtatatgagggtttttgtgccgttgatcaccacctaattaagattaccttattaaatgtttaaaatgataaaaaaaattaagttaatataataatatccatgcaatgatggtcaaaccaattatgcttttgatagtagtttttaatcaaattggcactttgtttagtactatttctgggttgattctcactttcgttcattattatatattggtgggtaaggtatatagccgacattcattttatttgatgcccccattacacctatataccccttatcaaacctatataattttctcaaaaccattgattccagaatattttggcaccatgcgcacattagcctttacccctctgaataattgcccattcttcttccagtacgttttgaacataaaattacagtgttactttccacttatgatggaactgggaactggacaatgtgctacgtgcattaccatttttaccctttttttaatttctctccctatctttcaagatcttattccctctctctatattctctcaccgtttcaccggaccatttcttctcacatattttttttctgactctcttttatcttttctggcacttaaatccgtattctgcagtgcacagttggagtactccctctttaaacactgaagggtgcggtctttgtcaactcttgcaaaagcaaaacaccaaatcgaagttaaaaaaaagaattaaaattaaccaaaaattcaattatgctatatattgctgaaaaaactaaacagtaataattgatattaaaaaaaactgatgtttttattttccttttaaaatttatttttaatcatggatttttgtttgcttttggttaaaccttccccaccagatgatgagataatcatgatccatcctcaattagctaatgctgcacaccaaactggggggagagagagagagagagaggggggacatttaacattttctttctgaaaaacaaaatgggttatatcagcaaatttgcaagaagatgatggtcactgtgtgatattgttccactctttgatgcttctgttgggtgttcagaggtcagtgaggcagaaacaacctgttctagaaaaagaacaaattttcctatctcattcacagctcctctcagtgggtttgatttggtgtgattattaccccatgctcctcttcctcctcttcttgttatgttatctcttcaacttcaaccttcacggatacccacaaaaaaacaaactttttggttgggccactccagtccaagcatagtggagctccttccttgatatatatcaactgggttttgtgcaacttttctctcttgccttgtggaagtatcataaagcaccaaactttatgccctgaggggtggattgctgagaaaacatttgggtgtgcttcaattttgcttttgcagttgaagattcatggtggggtgcttggtggttcagctttttgaatgttctgctcaagctgctggggcttgccttgaatctccaggactgttacgttggtgaatttggcaaggatgtctgtgaatcgaaggcttcctgcttcaaatggtagattgctatcaaatatgaagtcttggaagctgaatgagcctctgcatgggtctaattctcccaggacatgtaggaggaagcccttgcttccttggttttttggctttgttgccatagggagtgtttggttcatcttgagtttcaatagtaagtatttggtcagcaaggagaatgaagcaatttgtgaagagagagagagaaccttgctacaacgttacaatgttagtaggaaacagattcatgctttggcttccttgttctctggatcagatcaggtgagctacactttcccctccactctttcaattttattgcgccatatcgtggtcgctgaggataattcataattatttacttttgcttagaaactttaactatttggcttcttctatgtattaactgttctttctattgggcgttattgtcactaaataaacaacttcttgttggattttatatttgagatgaagtgaaagatgtaaaatactgagaaccaatagattgtcttaaatgaaagggtataaactatactattctgatgctttttccgcaaggtttctctaggatcgctttatgttgtacaaccggttaagttctaaaagtgatggatactatcttgctagatatttaatagaaaacagtggttgttgcagagatgaatatgaatagtaacaaagtggtgctctttgtcctatgtcttactaagtttatgatgcagattttatccaactgtattgatgaaagaagacttcaaatgctgttaagcagcggcatggtcagtactccacagttaatatgtccagagaatcaagagttacaaaatgagcatacatgtgttgcagacactgtagaacctacagaacaatgtccaattctcaatgattatgtccagacaaggcttgaattatcattcccattgaaaagttgtgtatcattggcctcgcactctgcactttcaactgatttggttagttatttgcaccacggaaaggtagaatctttactaaagctaaggcatatatttgttatgcccaaaagttccataatataaattgttgattctcctaaaaaatagggagtacccaagaattatagcctagcttacaattctcttttctcactgctcaacctatcctggggggcataatatggttgttgattgaatggagataaaaaaagaagcatagtgatgaactttaggattcctaaatatcattttctgtaagagtgctcagtttgtggaagctgggtgagaaatgtaactattaataatgcatcatctggatctacagtggtaccattttgtatgcacttgaatgtaatcaaaagattcccttgaattgcctatctggcatcatagcattctttctatagcttggctagtgctataataaatttttgtattgatgtgtaaaagacagggcatcaccgatcatagtctagctttcaaatcattcaacctacagcctaataataatagtcatatcaaggaaaagtagtggattttggtttatttgctccaaatattgtctttcccatgttacttgtgaatgtgatttataccatagattctgattgtaagcttgtccaataactatgaaggcatgcactccttgcatgcttatttgaaacaaatacttccattatataattaatttgctaattcattttggctttgcagaacattgtgcaatcatgggaactgagggtatctgcaattcggtatcatgtgagttcatctaatttaattaaaggatgctggtgggtcctcattggaattataatgtcctacttctgtttactatggaggaatcaaaagcagaagctagttcaggggcatccagctgcacaacaaaagtggttgaaacattttccaaggggtccttcaaggggtgctgggaggtggaggaaaaagttactagttatatttgtgtcacttggaataatcgggtccttttggttattttggcacctgaatatgggaattatgcggagaagagaagaaacgctagcaaatatgtgtgatgagagagcccgtatgctgcaagatcagtttaatgtgagcatgaaccatgttcatgctctggctatccttgtatctacctttcaccatggtaaacatccttctgcaattgaccaggtaatgtactcaatgtccttctcttctcttattggtattctcccactcccatcttatgcagacttattcatggccagtgactccagatattttgcatgtctcctagacacttttgcttagtatatcttatgtgaatctaactaacatatttgagtggctgcatagtaaaaaaggaaatgtaagttttttctattctaaggaaagcaaaatctgatccaaatgatctgtaaaaactagggaaaaggcactgttgctcactttcatgtagcaaaaactgcatacatataaaataaaataaaatgaacaaaagtaatggaaaaaggtggggatgctgaaaaatatgataatattgacaaaaaaaatggaggaattcaggttgtgccattgatccgtaatgtgtcaaaagtttgagctattgaaaagtatagataatgaagtaaagctcttgctatatgatttattttttctccacaactagcctagataaaatttctagcttctctctgtttttttcattgtgttatggtaatgttgttgcaaaaactaaatctgaaaggagagtgtgaatgagggtatcaaatgaatatcttttggcacttttactagctataataagaaaagcatgtttgaccacatttctaattgtcattgttataaattttattagaaaaatgaactagacctaattcaaccccaaaagctagatcaacagagggggagagaattgcccaagtgttataaggaataatttggccatgttttaagccattgtggagcatcgtaacatgcatcccctcatgcccaggactacatatcggagtgttaaggaataatttacaggtacctaacatcaagattgaatagactttggtatcatatttgaaatgggtgggatctaacttaactctaaaagttagctcaaaggggaggggggaattactcaaggctcaagcctttcaaggagtatttggccatatttctagctaatgcggaacgtcttaacaactttatacctgctttaagtatatgctaatcttacaaaaaagtgtacaaggtttgaactgggttcctcttttcacttgtaattctgatatggttaacactgaatttgattgtattagaccagtaaggtttggatatgtgtgaagattgcatagtataagtctccatgttgaaaccacattaaatttatgagtcctcttcaactctctgctatttatatgttgttcttgttgtaatattatccatcttgagggaaaacaattaaaaacaaaagaaaatttaaggataaataacattgaagcttctgtttcactgcagaaaatttttggagaatatacagagagtacagcatttgaaagaccacttactagtggtgttgcttatgctttgaaagttctccactctgataggatgcgttttgagaagcagcatgggtggacaattaagaaaatggaaactgagaatgaggcattagtacaagattgtattccagaaaatttggatccagcacctattcaagatgaatatgcaccggtgatatttgctcaagaaacagtttcccatattgtatctattgacatgatgtcagggaaggtgtgtcttgcttagcttgctgtcaccctaacatgatttactttttctaagcaaattgtggggcaatggcttaaactgcaaattttacattcctgttaatgttcgtaccatatttattctgcacaagtatgtatgagaaaactagagtgtgaagtcatcagttagaaagacttttttgtctgtattttctttatgcaaggtttaggtcgaagcattagatgcttggagcttttgtatacatgaagtggaatattagaactggagatcactaaacagtatcttatataatttactttgaacagtgaaagtcaaatgtggggtaaacagaatcaactacatacaagagttttacttatcaacatcaataaaatgactctgagcactggtatcacatgcttttcatgcctaatcagttgatttacattcatctcagtgacagattaagaagaaataagactaggagttactattgtctattgaattatttattagattcctcattatctgtctggttaacagaaaatattttgttgcattgttacacaggaggaccgtgagaatattttgagagcaagggcgtctggaaagggggttctgacatccccttttaaactactaaagtccaatcatctgggtgttgtacttacatttgctgtctataacactaatcttcctttagatgctacactggagcagcgtatcaaagctactgtggggtaatcctacatctaattgtctactggttaaaatatgcatttcatttgtgctctgatccaccacccctaaaaggaaaacaattacagtgttatgtgagtattgttacctatttattggcaggtatctgggtgcgtcttatgatgttccatcactggtggacaagcttctacaccaacttgccagtaaacaaaccattgttgtaaatgtttatgacacaactaatgcatctgcaccaatcacaatgtatggtactgatgttgctgacactggcctactatacataagcagcctagattttggggatccgctacgcaaacatgagatgcactgcaggtttgctttcacactttaaaaaaattgtgttgtgtccaaagaattgaaatctcataccagcacaattccttcttttccttttcttttgcaggttcaagcagaggcctccattaccttggacagcaatcaatgcatcagtgggggtgtttgttattactttgcttctgggtcatattttttatgcagcaataaatagaatagcaaaagttgaggatgactatcgtcaaatgagagagctgaaagttcgtgctgaagctgcagatgtggcaaaatctcaggtgtgatatatttatgggatttaggctttctgttatgccttggcacaacagtaaagttgtgccttggtgacttgttgatcatgggttcgaattcggaaacagcctctttgcatatgcaagggtaaggctgcgtacaatatccctcccccttaccttcgcttagcgaggagtctctgggcaatggggtacgtagtttttttaggctttctgttatgccgcacaattgttagagtgatgtcaagaataatgtaattcttgtcacatttcatatgtatattgcatcacatgatgatcatctttcaacatcaaagttatttctgagttctgatggtttataatttcttttacttaattaaaattaatatttccaccttgacctccaaggattgctttcccttttttgcagtttcttgcgacagtttcacatgagatcaggactccaatgaatggtgttttaggtaattgaaagtatttgttgttttcatagataaacccaacctgtcaatactcagtaataattatcagctgtttcaaataattttccaggtatgctgcaaatgttaatggatactgagcttgatgaaaaccagatggactgtgcccaaaccgcccacaagagtggtaaagatcttatctcagtcataagcgaggttcttgatcaagctaagattgaggcaggaaagcttgaacttgaagctgtagcctttgatccacgagctattctggatgaaattttatcacttttctctgaaaaatctaatgaaaaagtaatagaggtgagatcgtatctttccgctaccttagttttgtacctcctataatttgtacattaagtcttacatgaacttgtgttctctatacttttttggtgagtccagctggctgtttatacatccaatcaagtacccaaagttgtcattggcgatcctaaacggttccggcaaataattactaatcttgttggcaattcacttaaggtttgcattatttcatgctgtattgttattttttgggtgggtttaacccattttattctttgcatatatcatgatgctggaaacatctcataattttaaacaatgcatcattttgtccttttgaaagtgtgtccctttactgattgatattgaaatggtgttaataagtaaattcattgataatcctggtgatattgttttttattcattatttctttacaatatcaccttatatatatactcactagtaagtgacccatgcaatgcaatgggcagacattgtaatactacataaacaatttgaaggatttatatgtttacctcccttctatttagactttgaaataatctttcgaatttttattttaaattagtgtattttcttatctttggaataaaaaagaaggaatcttattggttatttatattctctattaatcagtttacttggtgcatttcagttcactcatgataaagggcatgtatttgtctctgttcatctggcaaatgaagtgaagaacccacttcatattatggacgcagtgctgagagaaggcttaaacttgaaccagaacgtatcaaacagaacatatgatacgttaagtgggtttcctgtatgcaacagatggaaaagttgggcaaattttaagcagttaggtggcataaatgagcctgaaattattcaacttctagtaatagttgaggacacaggtataggaattcctacagatgcacaaagccgcatattcacaccttttatgcaggctgacagttccacctcccgaacatatggtggaactggaataggactgagcattagtaaacgtctagttgacctcatgggaggagaaattggatttgtaagtgagcctggaattggaagtactttttcctttaccggaactttcagaaaaggagaaagcacgtctctggatgcaatgcggcagaataatcattttggttcagagttccaaggattgagaacattagtggtagatagcagaaaaatccgagctgaggtcacaagatatcatctgcagagattgggaatgtctgtggatgtaacttacagtctgaattctgcatgctcttgtctatctaatgcatgtaacaagaggtaatttgtcacttgactcactttagcagttgaaattaaaaatccaaatcagttgacagttgcgcacaataaaccttaagaacttacctatttaagttctgtcattcttcaatagcatcagggcactacccagtatatttcatgtgtacaagtcatatactatgtaaaatgatttcagaatatagattatctgtatcacctgctttatgtggaatacaacaacaaagccttatcccactaggtgagagcggctacatggatcacacgagccagcctcacctagtgggataaggctttattgttgttgtattccccataaagcaggtgatactgataatttatattctgaaatcattttacttagtaaacaacttgtacacatgaaatatatgttttttttttcagactgacccaatcctcaatgcatgcttttgtgtggatatgaattttgcgtgatcttgtgaaggcttgaactgcttggtgttctgtaggaaattcggttcctatattgttattaataagttgcattgttctttttttgctactggttgtttttaatcaatattggcaattgcttgtgttcaacagtagtaactttaaggtgcaattagtcatgaagtaaacatggtgttttatttctagtttatatttgttgatttttttataaaaaaaaaacttgtactggacaataggctattatttgctaaattactactactgtttttgttccttcagtatgtcgacccagttggccatgattcttatagacaaggatgcttgggataaagaatgtcatatcttatacacaatcaagaaacgtagacagaatggcatcaaaggggatccaatgaatttaccaaagatttttctcctggccacccaccttagctccaatgaacaggatgggctcaagtcagttggtattatagatgatatactgatgaagcctctttggcttagttctttgattcagtgttacagagtatcccttggcactgaaaacaagagagtaaataggaaaaaagtgtccaaactcgggaatttattaattgacaaacaaattttggttgttgatgataatgcagtgaacagaagagttgcaaaaggtgttctacagaaatatggggctaaagttactgctgtggagagtggcagggctgctctaaagatgcttaaactgccacataattttgatgcttgtttcatggatctccaaatgccagaaatggatgggtaacatatcttcttattcctattttttattttagttttagttttctcaattttgaatgcaaatggagacactgttctttcctataagaatagaaccaaggagcaatgactggtctagtaagtttattttgtaccagagaaaacacgtgaaaaacagtagataataattaaaggaactggtgccaaaagtcaggcccttacccttatttccttttgttaagaacctactacctagaatattttaaccacgactgatttttcccgggcctcatggccgtgttgttaaactgtaaaagtgtccactcaatcttatgtaaatagatataatgattaggcttttgccttgtaatttatttattttattagaatgtatgaaactatcttgtgattttttttttatcctctaggggggcgtttaacttgtgtaagaaatatcctcttgggggctcagttagtgtatataagaaactttataaattccccaatctgcatgctatcatgatatccttaggtgtgatcgatggccattttaacttgtgtaagaaataacagattactgagtgctttctagataggatctcacacctggaattctggatacatggctgagatataacttacaagtatttctcttcatcttaaatgatacagttttgaagcaacgaggcaaatccgttgtcttgagagtgaggtaaatgagaaaattgcgtgtgggcaagcatctgcagagatgtttggtagcatcccttattggcacattccaatacttgcaatgacagcagattcaactcagtcttccaatgaagagtgcataaagtgtggaatggatgactatgtgtcaaagccatttgaagaagagaagctctacatagcaatggcacgtttcttcaagtcagattcatagtgtggaagtttgaaatctttgataattagtgcagacagcctgctgacaagtgtggactgtgatgtgtagtatgatatcaattatcatcgaatgccatttgttggttttccattaaaagagctagcggatggattaattttggctaaattatgtccggatattgtaatggttggacatgccccagatgatgtgttcctaattgagactgcttgccagcatcaaagttatctattcagcatcatggatctcagctatggtcttgtttagtgttagtaagtaccatctttatcatcccaggatttttatattataagcgcatttcatacatatatatttattataattttaacaagtagaaatggatcattgaaatatacatgtgttacaattctaaatttcctttgtaattcaattatcttgagccattataggagtttaataagagtataagcctattcccgcattaataaattttgttcttatttttttcttcttttccaggatgctgatttcgagttcaagatattatcacttattgcaggacaggaggaggtcaacagaaggcataattgcgttttggtgtacataccccgtttttgttcctgcttcccatctcttattattctttgtaaatatttatatttggagctagtaggataagataaaaatcttatagtgtcgacatcattatttcattttttgggggccaagatggaaaggaatgacagatctttgaccctcataattttgtaagtaacatgtaaatcaaaattatttacatgataccagcagaatggcatatgtaacaatattttgtgacttgtaagattccaacttgtcactttgtaactttttttttccttaaatattgtcaagaccaaaaaatgttcaattcattaaagttgaatattgagctacaaggctacagattttggtaaatgagatacagtagaacatgaggaccactaacgaaccaagacttttttcccattgaaaaaggcaaaaaaagaagtggtggtaaaacagaagagtgtggggaaagggaaaataaggtagataaataatcattttgtaattgataaggaaaaaaaggtaaatcgtttgttgagttggaagaacgtctgacatcagagaaagttaagaatataagtcttttatgtgtgtttttctttccgtgattgtggagcacgtgacaaagtgtaaccgctgaaattagcagcgacgtcagaaataacaaataagcttttgctatgttacagctcagttctttctgtcaatgatggtatatgttattctcaagggagagccccaatttcaatgtgaccaaccctgcatgatccacttgcaagagaataacataaatttccttcttagccgttagaaagagacccataacttccttgcctttttgtttggctatgtatataagtaaccacattgcttatatctttggtatctattttataaactctttagtctttatcaatcagcaaagcctctcttatctttttctccaaaaatggcaacattcatgctgaagttggtgcttcctctacttttcctgttcatgattcctccgaaaacaggtaatcgaaatgtgcttcctctactccataaatgaaaacattgaaatgttcctagttacttcttttctccctctattgtttttaattggccttttccccattagggggtatttttttattttttatttttcatttatcaaatgggggcagtatttaaaaaaattaccatttgggagtaagtcgtgtcacgtggttaaaaattagtcgctaaaaatttagtcgctatttcagtcgctaatactttttgcgatagaatattgttttatgcgactacaatattttatcgcaatttttagcgaccaatttttattttaaataaaaaagagtcgtgaaaataaataaaaaaacccaaatggtaatttttttaaatgctaccccatttagtaaataaataaaaaaaatatccccattgaggaaaaaaacctttttgatttcattatcatatttaccgtttgattaaatagttaatctaataagattctggattaaaattggacttgttatgagattataataatgagaataaagagcaatacatcattcaagttaaaattgattacatgatagattagatgttgtacatatatattcatcctcaacaaagtgttcatcttaaaaactacaattcatgcagcgtatgcggagtttgagcaatggtgtgtagctgatgagcagaccacggagtctgagttgcaggcagccttggattgggcttgtgggaaagggggtgcagattgtagcaaaattcaagtaaaccaaccatgctatttaccaaacacattgaaagaccatgcttcttatgccttcaacagctactatcagaagttcaagcacagtggaggttcttgccacttcagaggtgctgccataacaacagaagtggatcctagtaagtattaaatagattcctgataaccactcacttatttcctactttggtttaactaggacataatgcatgttcacatgacagagtcaattagtgcaatttaaatgaacctcatgcttgaaggttaatctgtcaagtatagattttacaaataaatccaaaatctttaaactacattcaaactacttcggtaagcgtgcgtgaaacagaaaaatttgaactgaattggcacgagtaatgttctcattctcactaaacaaattttagatcaatcaactgatgaacaattatactttataatctcataaatagtgtttctcatctcatattataacctgaagaaattattcttttacacttttttccttccatctccttttacgccactccgttctgcacaataaatggtctatgaaaatggttccacacacgagtcccttttcagttgtcagggattggaacaatcccgatttaaaattatttaagttttgcaccacagaaaagtgtatgaataatggtgatttataacctttttgcttaatgtttgtgcccaggtcatggttcttgtcactatgacttcattccctgatgacaaccgtgaatgaagacttaaaataactgcagcaaaaactagagctcgtgcctttgtgtgtttatgtgtcccaaactcccaatcaagcaatttttttggggcctttttcttgtattattgatagtgctgaaatcttacaattcacttgatctaggtcaaaggctggaaagtcataataaaatcttgtctagcaaactaacttgttatcttacaaaactaaattaagtttttcctacattaatgtacgtgtagctcaattgaactcagtttttaacaaggtattatgtgtttgtataagaggatttccacgtcaaatagagcaaaagacgtgaatcaagttgttttaaacgtgcatccaaacatgcaggtatacttgttccggaccaaacccgggaggctgcttgacttaagaaggcatgcattcatcttggaccaacattgcttgcccctctatacgatcccttggtgggcatcactactaaaaaaaattctaataaaattgtgaattatattcagaaaatttaacttgaaaaaggatatgattcttctacccatgttatgcacccaaagtacaaaatctctaattttttaggattattgattcttaacatagtatcattacacattaagtgatgacgagtttgatcacgtcactcttgttactattcaatgatactgatttttagtataaattatctctagctgcacttaacaaggactaatataaagtgattcatgatggaccacttttgttgtgattggtggaatattaattatttaacgagcagtcaagatgaaaaatatttgacctgttatagacggtggatattagaagttatgaatttagctggttcaacctttgaaaattaggtctttttgcagaccagtttgtttttaagtgtaaacataggttcggggcagagttatggaggaatgactaatgagcagaggcatcaaacatcctcgaaagactattttgtatataaattgtgattaaatgtaagtttgatgaactcttccaaccaagctgggccttggaccatttcattcatgaattgtaggagatctcctcaaattcaaacttgacaattagaccgtggtgatggaccttctcataattcaaaaggaatacgattgaaatatgacaatttgtgaatcaaggtagaaggatcgagttagttatcgagagttggattctagaattgaaagtttaatcagtgggaaaacaaaaactagggtagaagagagagaaaaatgttcatttttctaatgtaatggtctaaactatggccctcacatttgaaacaaatcacttttatatattgttaaagagtgagacagaaaagaagtttcctttttctaatgtgatggtctaaagaatggctcctcagatttgaaacagtgacactttaatatattgttaaagtgtgttaaggttgagtaatattgggccaaataccaagaagcccagtacgatcagcacaacgagatttatgacaaacttcaagggataattacctcctaaataattatccgaatcaagagaagatcatggataatatttgtatgaagaatattgataatatatggttcatcttttaaagattatgatcaagaattgcaagaatttcccttattttgcacaggtcagtgagaataaatagaagtatcaccaaaggtgtaagatacacacattctagctctttcttttccattctcacagtgcacacatcccacgtccaattgtggtttgggtactgtgatcgtctttctggagttgtttgatcttcataagcatcttcagagagagagagagagtttgatcatacatcaaatatctgacattgttgctgaacatctgtttttaaggaacagaacagagtgagactgaaaagaagattcatttttctattgtaatgatctaaactctggccctcacatttgaaacaattaactttaatatattactaaagcgtggatcaaagagtgtattggtaccgttggcacgaagttgttctatcttaagcacaacctgtccttgttttcatatattactctggctctcacattcaaatcattacaatagaaaacttgtcataataatctaaaattgtttatatttgaaaattgttttttagttgattaataattaaaatcattaaccttaatttgtttatcagtattaaccttagttcatgagcaaagcatttatatccaagaggaagtgaatagaaagaattctttgctgttctataaagtgagtgtcattctcattttaattgagaaatgtttacctgttttttagagaagaaatttttacctaaatctgttatattttcagaaacatttatgtctttaaatagtaagtctaatctaaatttacgtataaaaatggatggattacaaatttaactctttttagtttgtttttttactccataaattttactctttaagaatcataaaaataaaaataaaaaaaggtaaatgggcctcaatatgcagaagtacagcccatgaataggtaaatgggcttacaagtattatttattcctttggattttggagaactttgatcagtggagttaagctttaaaaagtacttatttggaaaggtttgttaacctgatcaaaaaggaaatcatgctttgttgacaattcttttaatatacttaacagagtttggttgtaacgaaaaatgggttagttttagctgaatttatttttgaaaatgcctttacttaactactattttgagttcgagggttagtgagtgtttaaatatcatttgggttcaactaaacccggtcaacgctaattcaacacagaccttgctaaattgcttctgtgtttatgccgtggaaagtgcaaaacttccgtaacgtggatcaaatgggttttcaaacacacccttaatcgtttaactgcatcagtagaaatatttagtaaaaaataccttaagtatattgaagttaaaataatgattttgtaaacattaacctttaaaattgatgctaagaaaataaatttgaaaagtttttattgaaaaacatttattatattagaaatgtaaaaatcattttacattgtaattaataaagtacatttagagctgatatcaacaaaactatttactcaaataaaaaatttcccctcaaaacaaatatacactaagagtgattattagatttagaatttattatatatgtaatagttcttatttctccaaaatcttcacctccttttctctcgtacttttttgtctttccatatttctctactaacatttaattatttatgattcctaatttttcatcataattgtctattcttattaaactactttgaatgattgttttggactctttaacttctttttctaacttacaaaaaaactctttgttattcatgctcattaatgccaacacatttagctaaatgagtactcataatcattcaacttctttaatgttattatttttttcgtctcaccttatttcatcaattcaattttcttcaacctcttaattgattcttcaattttcattatgcattcaatgaatttttttttttcacattataccttcctttttccatttgatgctttgttttcttcccaacacccttaattatcaactcatttcatttctttctatcattgtgttatgctctagtgagttttcttcacctacatcccatggaggtactagccattttttcttcatccccttcctttcttcaattaaattctctgtagcatttttttgcctctttcaaataagctaactacatcggcttccacaagattgtcacatcgccaactgcatctcaatccaacattgtagggcatgcttcaacattaggggtaataagacgaggtacaaaccacaagcaataagagggagcatgttggaatatgagaaacaaaagacacttatacatttttcagttctttttttaagttatttttatcatttaaaatgttctatatttcactaagtcattattttttgtgacaatttgaatttgagattcaggcatttaagcatatcaaattgaagtcaggcaacacatcttttcttcatttatgtatcgtttcttggattttttattctacctcctttgttttattaatcttcatattatcttttaatttatttgtagtttttgcctctcggcatctatcaaattgcattatcaaaagctactcaagttattcaattatgcgattttgaaggccaaaatggatttttaaattcaagccatctaaattctgatgttccctttgaccccaacatcaaaatgcttgattatgttttttcctgatattccctttaatcaaaattcaaggttaattttttatttttcgatatatttttaagttttacgagatgcaatgagtagtgatgcaggtttcatgagccagttttagtaacaaacaacaaatgtagttcacaaaattgagttacattaagaattggagagctttggatgcaatgaacttataattctaaaacatcctacaagtgcatgcgaagatattggttgcggtatgtgtgagtataaagtgagaaaaatatgtatttaatattttatgtattttgggggtattttttgatggatttggtaataacaatggttggaaaataaaaaaatttggtatgttgtttgaggcaagtatgtatatacacaatttgtgtttttttagtttttttataaaatataatattgtgactgtgttcatatttaaatttcatttaatgatgtatcatattacatatttaattgttattgtaaaataaatattaaacaaaattaattcatgcatgacaagggtcacctaactagttaaatacaaaactgtttccgaacaacacatgcatagaacataaaatgtctcttatgtaatttatttacaacataattttttcgctctctacttatctttattggttgatattgattcgtattacttactctttgcaaatagtcgttcatgccaataatactattactaaacatataatcaaaattacgtggccactcggaataattatttagttcttcattgtaattatcataccaaactagtccttaactaaattttatttttctctcttagaatcatcatgccatgccatgtaagttaggtttttcatcctatattactcaaagaacttaatccctttgttgcctcaaaaataggaaaagcatgtatatatatatatatgacactattattcctttgtaatattttctctcttatatttctggaattttcatggtttcttcaatactcaaggaaccaaactgagaagccctgcaataagagtcaaccagaatataatttgaggggcaaagctttctacggtctctgtttagaatttggaattagaattaacaggatggttcctcgaaagtcaaagtccttggttgactctgcatttgaataaattaaataaagccaacattctgattaagacatcagacaaattacaaaaccaaaaccaaaaccaaaagtatacattaattgaggagtaatcctagcccaggaatcttaccaaaagcatgtcttaattatggagttattcgattcgagtcaggagtcaaaacacactattctttgtaaaattataaatttccttattcaaaactaattcttcacattgtaaacttattagtatttctgttgatcaaacgtattcgatccttgaaaattgagtagggaatataaggtgatgatattgacccaaaaaatggtttggtttgccagttaaaatttggtactatgcttgacaagtgcgcaattcatttcgtccagtccaatatttcaacttgaaattcccaaatatttagaactttaaaggaaagaaagagaccttgtcaaacaaattcttttagtctagtgtgttggaatgccctcatcaaataactgactctgacttgctgtttgacgatttatatatggtaattggtaatgaaacttcaattctagaaaaatgacttattatcaacaaagaacgtgtcaagaaggtagccaaaaagtttagagaaaatataggttggctaacgtaaattataattaagtatcaagtacttgcttacctggtccctctgaaattgggtttaaacgtgtcatttgcttttcggctaatatgcttttcgtaggagctagtgtctttattctttactgctacacaaaagagagaagatggataatcaatataaaaaaatagacaatttgatatttgatatatgtataactcgtgcacacaccctcgcatgccttagcattaagcaacttgtaaatttaaaaatatttatttggagtgatggatttggatgattttgaaattgagaaaggaaaaggctaacccaaaatcagatttggaacatacacacatgcaaactcctccactacacacatcccaattggaatttgccgcgtcaggaacaaataaaaatgtccgagtaaagaatatgttccaaattaaagatgggcacatgtggtaagagggacccatatgttggccaaaatgcatggcagaacatgttgataaacaatgtaaaccctttaaaatttacaaaatctgcaactttggtaattgattggataagaataggacaaattctgcagatgaaaaaggacagaacattaaggtaatgtatctcccaaaaggccttacatgggcggtgccatgacagcaaaactgaatacaaaagtcaagcgctctcattatggctttttggttttgaaacacactcctgaaacttggtaaaatttcagaaatgtaattggaccgagtttaagcctagccccacatagcagctaccgtgagtgtgtgtattaaacattggtcactctatatgagttcagcttcattttaggaatttggaaacgggggacaaatatttatcagcaaggcctacattttgtcttttaagtatgcaatttacaagactctgcatcctaaagtactacaatcggcatgccaaggtcgagggacaaccttttgctatttgatcaagattttctgacaacaacttgaatgtctagagcccctcttgattttgataagcttatgcagtttggttaatcattaaagtttgatcttcaaagttttactgttactgttaggttttaaactagcttcaaacttgcatatcatatattatttttgtttagttaagcataactgggaaatgaattagttaaaaaaaaatatgatgtgatataattgatagataattatgtctcttaaatatatagttaggagttgatctctagatatgtatgtttataaaacaacatttgtttatacattaaaatcaatctcttaaataaattttaatacatcaagagattaatctttaatttttaattgaaatattctaattttttttttaaaaagtcaaaactgaaatttactctaaacctcccatttatatgaatgaattgaattgatcaattattgaaaactgctacgtggagaatttttatggacttaagaaaagggattatttaatttctaatatgtcacatgcctaataaaatgaactccactttatcattaggtctgattgtcttttaacttaggcatgactcgcactaaaaggacattaattagcagagagatttcactcattattggttagagtgtgtagaatatatatggaagaaaaaaaaactttgcttcagtgttgtttgcactgttttttttattagaattgaagttttatctcaataatttacataattttttaatacaaacttttttaacacaaattagtaaggtggaactctaattctaattagcaaataatacaaacagtatttatagaattatatataagttttgtacaacataattctcaaagaaagctcgaatactctcattcgctatcctgtaggttgtagtatgttgcgtactcggcaagtgcaccggtcgctcaagtaataaagtgataagaaaggggatttgtcgttcccaacgaggattgtttggtcaattaaatcataaatcttagctcaaggttggatgacaaaagggtatttgagagagatgttgttggacaaagtaaattaaaagctaaagataaacataaaggatatatatacaagatggataatgggtgtaccaaacgcaacctaaggtaactagggactcacacttaacattcctagcattcttcatggattaattgcaacattcatttacactacctatttagctagtgtgttttcttctattgactaagcttggatccctcgccacttagttctttaactcacactccaatcctaatcccttagtgattttcggtaagttaagcattaggcaaacacacaaatgaacccaagccacgagcacccatccctattcctaggtgatgttagcaagtcaccacacttggttccaagactagagccccaacattcctattgtgaaccctagctctaaacactcaactagattgatcaagtctagagaagagaaggaaacattcaagcaaagtgtaatgaaatagcatagcattaatgaacattaaatacaacccaatccaaatggaagtcacattaaatgcttgccctaattacaaaaggaaactaaccaaacctagacaaggctggccttggtacaacaaaaagaagcatgaatggagatatacaagaaagaagaggaagggaagagggaagaaccctcttcccctcacacccaaaccctagctcaacttccaagccctcttttcttccttggtggtgattttcgtcctccagagctccctcttcagtgctgaggcttcattatttatagggtagcaagtgcaatctctattttgcccttattatgcagagttctgcgacctgtggcgctcctggcgcgagaacggcgctcctggcgccaacatacagagaaaatggcgctccaggcgccggctggagaaaacgtggcgctcctggcgccagcctggcgctgatggcgcaggttccagagacggtggcgctccaggcgccaccctggcgctgatggcgccacatgcaaaactagcctatgtacccccgatagtacataggcttgatttcttctctgcataattctctgctatttcacctgctaaacatcaatctagaccaaaatacctcattaaagcacataagttacattcataccaaaaggaagttatatatcatataaaatgatgcatttaacgatctaattaagcttggaaagcatcatgtgctaggcacatatcaaacaattcccagatttgaacattgctgtcctcagcaatgacaaagatcttgaacaagggatcaaggacagacattcaatcatcgcatcacagaaagaatcatagaatccaaaattactacacataactgagcttttgtattgaacttcaaccatgtttttcaatttcatcaaaccaaccaacttgaacacccttaccagataaaattcactcatcactcaagtgtctagggtgcaatcaagatcactctcaatctctacagccataacactgccataggcttgaccatattctcaatttcctaagaaaagacaacacatgcacacttgatcaaaaggactttcagggttgtaacttggcttgactaaagggtggatatatttggaaagtgactaagcaaatgttgagattgaaataacatcaacttttccattcattccgattttcattcatttcattccactacctctttttagcatttttttttcttttgcatttcccttttcatttttgctttgcctcctttttctttcatttcatttcagaccatcttttgatttttcttctttcatttctaacacttttcacctgaattcttttatttcatccacaaatcacatttgcattccaatctcaaccaaggtgaggttatgatagtggttttcatgtctttatcaggtttttgaacaattaggtcttaggctcaaaaggctagcaaaggatcattattttcaggaaaggctatttggctcaagcttaaaagaataaaattgcctttatcacatcatttatgcatgtatcatagagaaacagggcaagttctagagtgttaccactgtgagaactctctaaaaagaaaaattttctgtataggctcaattttctcacaggctatagtatcaagctaggtttgttgattcaatatcaaacatcacattcattccaacaatcactcagtcatgcaataattccagattccaatcattattcatgcaatgtaattctcaaatgttctaatcacaatttccctattctcaatcaagttttcactgattcagctttgtaaatctgggtcatgcttttatcaaaagtgtctaatatgtactcctacagtgtatgctaggaattagacagtaagttacttatccacaaaaagaatttctgacccaaaaagaatttcagacatccttagttctcaacatcattaattttctcaattaacgcatacccccaattcccagatttaaaatttgctgtccccagcaaataattaatgctaggtatgggaagaaacaaaaatggtaggcgttaattgagaacacaaaggtacaacggaacatcagtctattagttatcccaaaatatgtaccaaggttcaatgcaaatagaaacaaaaactgataaataaaacaaaagatacttctaaaatgcagaaaccaaaataaacctaaatgaaacactaggacagtaaataaaatgcaatagcaacattactcttcagccaaaaggcatctggtgctagtgggggctcaactcctttttcttctttcccttgtcaacttgcttgccctgaaagtcaaaaaccaaagtccaacataccatatgttcgacaaatctacacacaattcatggcctaatcagtggacaatgggaattcccagatttagaatagactatatcaaggtagaattgacttcaaggatgccttaacagttcatctaacattataaacattggaaacaagttggacaagtaaaaagacatcaaacaaaacaaagagtgaacacacagccacacagttaacacgtttgtgcatacgcaagccaatgctgtcattcccagatttagttgaaatcatattgtgaacaataagatgtacaagcattccatatgatatcaactattgaactacaaacaaggaaccaaaatgactgatgaacatgaaacttcaagttcaggataatggtcataaacatccaaggttaaacaacccaaattggtcacttacaccttcaacaaagaaatcctaaacttgaattcaacaaaaacttacaccagtattaaagcaagcaagacagattccttgattggagcacattgaggcaataagaatagaccatattagaatgtaatgcctagacatgtgctcaacaaaatagttctgagatgtcacagtgcaaagcaagtgtaaaattgatttccaacacaatttcacacaaaaacctctcaatagatgatattctatctaagcatatgaggccatctcagaatcacaagaagcattatcagagaacaacaacattgaactgccctaattctaaccaattcccagatttatccaagcaacattactatgcattgaaaactaacaaacataaataaaaacaacacaaagaaaataataacaaccataaacaagaacaaaaacaaaaacaaataagcacagatacgggacacaaagatatcctccatgagtccatcctcaagcccttatctgctccctattctctcagtagtatctagttcctcctcttgttcttcttctggtgacgatctggaactagatacctctacttccttcctttgtttcgctaattctgggtcctctaagcaaggattcacgggttagcggtacctcgcataaactctggaagcaggttagtaacaaaataaatccaaccttaaagataaaatattataatgaaattggctaaaacaatccccggcaacggcgccaaaaacttgttgcgtactcggcaagtgcaccggtcgctcaagtaataaagtgataagaaaggggatttgtcgttcccaacgaggattgtttggtcaattaaatcataaatcttagctcaaggttggatgacaaaagggtatttgagagagatgttgttggacaaagtaaattaaaagctaaagataaacataaaggatatatatacaagatggataatgggtgtaccaaacgcaacctaaggtaactagggactcacacttaacattcctagcattcttcatggattaattgcaacattcatttacactacctatttagctagtgtgttttcttctattgactaagcttggatccctcgccacttagttctttaactcacactccaatcctaatcccttagtgattttcggtaagttaagcattaggcaaacacacaaatgaacccaagccacgagcacccatccctattcctaggtgatgttagcaagtcaccacacttggttccaagactagagccccaacattcctattgtgaaccctagctctaaacactcaactagattgatcaagtctagagaagagaaggaaacattcaagcaaagtgtaatgaaatagcatagcattaatgaacattaaatacaacccaatccaaatggaagtcacattaaatgcttgccctaattacaaaaggaaactaaccaaacctagacaaggctggccttggtacaacaaaaagaagcatgaatggagatatacaagaaagaagaggaagggaagagggaagaaccctcttcccctcacacccaaaccctagctcaacttccaagccctcttttcttccttggtggtgattttcgtcctccagagctccctcttcagtgctgaggcttcattatttatagggtagcaagtgcaatctctattttgcccttattatgcagagttctgcgacctgtggcgctcctggcgcgagaacggcgctcctggcgccaacatacagagaaaatggcgctccaggcgccagaatggcgctccaggcgccggctggagaaaacgtggcgctcctggcgccagcctggcgctgatggcgccaggttccagagacggtggcgctccaggcgccaccctggcgctgatggcgccacatgcaaaactagcctatgtacccccgatagtacataggcttgatttcttctctgcataattctctgctatttcacctgctaaacatcaatctagaccaaaatacctcattaaagtacataagttacattcataccaaaaggaagttatatatcatataaaatgatgcatttaacgatctaattaagcttggaaagcatcatgtgctaggcacatatcatagtagaacgtgtgtgaaccgtttcttgtatgcatattgtataatatggacacacaagtatttttgctcctgccttaaccaacaccttcaatgttaagggctactattcgaccaacccatcttccttactttcacatctagctgaaaacaaataaattcaattatgataaataaatatactaaataagtagaaaatcgtgcatatgcaacagtattgcaagttcattctaagagttcaagttcattttagtgctttgggagtgggggacaaacgcagccctacattcccctatgtaaggcacgcaagttatagggtcttctagcctaaagtgctattctattgccacggccagatgcaagcattttgcccttttgattgagatatctaccaatttcttgtctccaactgctcatcattttgatatatgcacgttggcaaatgattagaggacagaacatggaattggtagtaataagattaaatcaaatcaattcaaaattaatttaagactcaaatttgataatatatttattgaattttctttatgactcaagttggacttatttgaaaattgaattcattatataaatgagttggatttgagtaatgtataattcaatttatttgatttataattttaaattgaatcgagttaattgatctaaattgaattattcacaaacttaaataaaatattatttaaattaacaaaaaggtttatattgaactcaaattaaattttaaaccaaattaatttttattaaaaagagactagctaaacttagttccattcatttcaactcatttttaacactaagtggtaaagttttttttttaccatatgataagattaatgatttataggtaaatgtttgtgcatgataatgtactaaaataaagaagttttaaaattttatgtaaatagaagaattgaacaatgaatgttggggatgagacattcaccagtaagcttaggttttgggtcttatttttgcaagctcaaacgtatcttcttattcttccagatattgtacagagacaacaatgtgaaagtcgtgggagaagaaaaacagatctcataacgatggctacacatgaagtgagcctgtggaaatagttgttgagatagaatcatagaactcatctcctaacgttcggacatgacaaataaataccatctagtcatgtggtagttgtcaagttttgttttgtccacgtctgagatgcgaagtaatatagaagaaactaatattacattggacaaaaaagtgaagagtaatggtaaattatactagtttggtatgagtcattgacttattaaaattaacatttggaattaattatgttggttctaatcttattatatcatactaaattcccaagactttatctcttattatcaaataattttagctcttcaacaatgaaaatgcagtcaaccatggtgaaatgtgtagaggggaaattactctgtttttatggacctgaaagggagtttcaattcgttgaagttaaaacatgccattgttagacgactttaatattttgattagatttatactactttatggatgaagtacattaaagaaggataacaaggatagatgtactgttttacttttgctctttttttaaccatagtattgtaactaacaaaattgagtcgttattgttgaaaaaaaattatcagtgctgaaatcaaattaaactattataaatattaagaaaacaacaaaggtattacaataacaagcaaacctttttttaaactcttgagttccaccacataaatattgaaacaaactattatatatggtgttctttcaaatttattatcaaataagggtaagaaacttagacttgaaggccgaaacatttgaaacaacagaccaacttcagaaagttgattgatggccctaagtccaggcgtaaagcaaagaacatccaaaactccatcctaacttcaaaaggccaatccaaaaattcagcaagaattacgtgatggcattttatataaaatgataactaagtttttttttttcttttctttttccttttcatcttttcattttttttttcttttcatttcttaatactcggatttatgccttttatatgaagtctcattcaaccctatattcacttaagctaatcgtaaaagaaaaacaaaacaaaaagcaacaaaaaataaaaacggtttggtatttgccccattttttttttggccaaattctagaattcccttagatttgtcaaaataaatttttacccacctttaaatttttttacatttcattaaaacttgattggttttcaagatttatctgaaatttaatcatgctttatcttttaagtttcaactcaattttttataaagcaattttcaactcaattgatattctatatacaccaaaaaaaaaaaaagaagaaaaaaaaactcaattgatattcaaatccttcggccaattcatctaagacagaagaattattttacatcaatcagtgacatgatatcaagatctaaatttggggaatcaaattagagtccaaacaatcgatgatggcgaaatggcttatgtcactttcatttcatctcgtgtcatttttcttgtccaactggaactcagatgcaaaccataaaagcaaataaaaaattatttgagagagattagagatcatcttcgcttgacctagaagctaaattaagtacatatgctccaccatatgtcaaataaataacattttgctctctatgtagatcttcgacaaaatcgctggcgcacaccagaataaacacaaaactccaaattagagcaattgacaaataaaggtttaattgcaggtaagggtgtgggccatgatgttcactcactttggactggacaaagtattaccaagattcccttttctttcttctttttttggtttagttctttggtacatttgattccccaaagcatatttaaagggtaaaactacttgctaaattacatcaatagactatttcatgttttggcaggggagctttataatttgtaagatcaatggacgcataataatttgacacttggtttcacgtaatatctgactataacaaagaaaaaacaaaaatccttcatgattttattcatttacggtttctagagaaagaattaggcatttttttccgttggtctttcagcatttcattaagaacatgatctaacaatatcataagagcacgcgtataaagtgatatatatatatttatatatatatgtgtatgtatgtatggtggaccttaataaataatagtagcacggccaagataggaatataaacagtcgtgagttgatctttgctttgtcttttatctttattttcttctaaaatagtcagtttattttaaatttgggatttgaaacaacgtggattcaaagtcagttatgcagattatttattaacaatcttccaaaaagttgatacatgttgtcctaagccctattattaatagtcagattatttatattcgtactagtgtgcattgggtacatgaatataaaatgaaaaaagcattcatgttgtattaaaaaatctattgtaaagatgcttcttataattaaatttgtacaaaccacaggaaaatctgaatttggcattataaaaaacaatttaaaaaatggctaaagcctaattatcaccgattatgaaaattcactttacctaccttaatgcagttatcgcccaatccttttcgcttttaataagttgaagacgcaattatgaaagatatcctccaggaatgtgcactcttcaataatttgagttagcagtaactttccataggctgcatcattataacttcaaattggattaggataagaagtagtgattattttaaagctttagagattctaattggatatttctgagataagttcaatggattatgaaagagaataagtgcaacaagcaaaatacatatataaataaatgtacagattttaaaaaataaataaattgcaattactaaatttgatagaaatggagatcatcaagtgcatgttagctgaagtgtaaggcactacttacatcattggtgccactgcctttattgtacggttctctctcttctaagttctaactcaaccgtgtggtgtgggtcatcatctaaatgctacctttttaatctcaacaattcactgatgacttatgtatactattgatcgatataatttgaaaataaaaagataatatggtcgttaaattacgaaaacgaccttaatttgctgacaccctctttatcttagttttctaatttagttggcacaagctaagataaaatatagaagcacctgaaataaaaagtgaatctaaccagattaatacatacatgcatgcacaagatccaacataattactacttatgaatgcaatagatttgtcacttctcaagatttaattgcagacaggtacctttgtataagtcaggttctgattatttggcacttctaaagtaaaaaagtgtctaaagtgataaagtaggagcgcatttactgtcgaatttttaattaaaaatacgttatgattacatggtattttaattttaatccagagtagataaattcttgttttctcactttatatagtttttcactttagaggagttaaattgatgatttttagaccgtttgttgtgtgtgaggtaagcaaaaagtaggaaacatttaattactatatataacataatctacaacgaagtggggtttcctgtgtcacactcagttacatatgttctttccgtataacctaggtctatatacctttgatcccttcgaagttagtgcagtttatatcagtttctcttgcatagatggtcacggatgatggttttccttagattaaaagtgtggacaccacaccaacctatattggttcggcttattattattattattctcattaaaatacttgtaacaatcactaagatatacacatttcattttcacaagaccaaataccatattgctcgatatctttttccagtgtgaaatgtgaatcctctctcaagacttcagatttcattcatctctagttcttattttcttgcttttgatgtgctaataatgccatcctccaaataactgaaatgggaaatttttatttcatgctactgcaatcccctgaattgcacttgcaaactgttgagtctccctttctttgagcaaactatggcaaagataaatatcctttaaatcttagtttctgttatttaattcgtgaggatctatcaccagtttcatgtcaaactatttctcagcttcaatttgaaagaattaaggaaaaatatcactcctggctttgattttcaaacaacttactgcaccactgtatttcatctaaacaattactcttaaattttctcaaatcagagataagtttggattttgctagtggtagaataaatggtatattgagcagtgacactcgaatttctatttaatgtatcaatggtttggggtcaaatgacaatggattttcctagtcgtgtattgtccacctatgaccaacagaaagaaaaatacactcgtttttcaaaactataacagaagctattataacacaaagtaccattttttgtagctaataataatagttaactacaatcgaccgataagatgagatgagcatgtcatttctctgatgtcgttgctcatacatgtcgtgcaagagatatcggtccagctaaaccaccctggatagtcattatcatttatcattattaattgtatattactaatatttgtctatgataattaaaccataatctatataattaattcttattatttgggggttgttacttcaaataacttaagtttgttggccgaggtttttttttttttttttttttatcattggttgacaaattaaattaaacttcactagcagtattcaataccgtattcagcaatgattttcacgatgtgaaataaatcaaatatataaataataattttaaaaaacgagagaaatgtttgagtgaacatataagtaatgaataacttgttaatcagttgtctaagtagtgaaaaggatttaatttggtttcattaaatgataaacgtttaatgattatgaacagtttaatactgcatttgatattaatttgatttgagttaaatgataaaatttactgatcattgaagtagaagcagcgttgcatttcggacaaaaaacaattcatgtatgcagatacaattatgcttctgtatgttgaaatgttgaatggttatgtctttagtcaccaaattggcatcaaagttggtaagtcattaatgcaaaccatataggaggtggtgtggtcatgaaatgaagtactgaactacggtttttgtagcagtaggtagttaaatttggatgtatgatactactcaattgtacacaagaagaagaaaaaattaaacatacaagtatttgttttttctacatattttcttttgaaaaagataggtattaaaggtccaagagaaaatgaatagataagtagatggactgaaaaggaaattgaagtgaagctgctcatgctaactcactcaaaacgggccacgtgtgattgtgaggcacatttgtaagagtggcattgatggcagtatttgaccaagcatactattaacaaggggtattcctgtcatttcaataaaaaagagttgtcaccgagcatcatcatattaacattaataacaccagccaatggtttctgtgtagtttctataataatggaagggcaatttctccttcattattttatatgcatatgccttagttttttctccattggaatagccttgtcttctacactcccccaagctctgagtttctaatcctctgtggttttccaacctcagaatttactcgaaacttggtaagaaactggttttatgttcaaaaacttctcaaactgaagccatttcattcatggcttcatattttccttgaaaatttgcttcagttttgatcttcattgatttacaagggtttctccaaacggtttggtgaagtaaaacatattctgttaatacttcttgcccgtgaactttttgagttctagtgttttagcatttctgcttatgatgtgaatttgcataaatgtcaaactttcctttgtactctttaattgtttcttaaccaacttctgcaatgagatgtgagctttgatttgatgtgcatttttctgtgaacctatctggttgttgcacaaattttgttttgatacacacacacacacacatatatatatatgtgtgtgtgtgtgagtactgtataaggggtggtttgattaaccttgtcttaactaggtgttgtcagctaacaacatctgtaacttcatcaaactcagaaagaaaaaaaataaaagcacttctccaattgctgttactgcttttgtggtttgtgaatctgttctgtctgacattcaagctttcttcttttcagctcagccaagtgaatttagttaatctagtagaattggaaattttcttaactgtgatttataaaaattatatttttcattagatttggttgagcctttttccgtatgcaaatgttaattctgcagttttttagaatgattaacttcattcaaatgaaaactaattcaatacaatatgtggggccatgtatagttctgcttgtctcatcttttgaattttttaatggaaattagatgttcatatttagataattccctttccctttctgaatatctattcccttctctttgttcaattccgagttatttttctttcttttttggtggagaaaaatcaataatctttagaattggtcgtttatgaagtttcttggaaattcttctaattgattccatcagttcttcattttttgtcataaaaaagaaaataggcagagagatgaattgtttgacttggtatgagagtcaagttgttgataatacacggtagaaggagaagaaaaaagtaaactaattttaacagtgcgctgaccctgaagagtgcctaatttctttaagacaaaaaagttgtccttatattctggttcctgtcaactgaatatttcagctattgctttctatctcttcaattcattggaagcaagttgaaagttgatgatatgataacactgatgacgttgtgatttttccacgcagacagcagattatgtcaaatatgtggtttataacctcccagaagagagaaccttgacaactcaggactatatctttgttgccatgagtatcaattagcagctttctctaggccactattgtccattgttctgcttcttcatataatctgctggaggagatcacttgaactactataacacagttgagaccaagtcaattctataatgcaggcatcagagcaacatagaagttcaagtatgtactatcaaccattacaacaaattgaagcatactgcttgccgcagtatcagactcgaaatcaacagctatactaccatgatggaggccatggtactcacttttcaactccaagttcttcagaactttactgcactttggagtcatcttctgtagctctttacaactccccttcaactgttagtttctcacccaacggcagccccatatcgcagcaagactctcagtcatatccacctgaccagtatcattcccctgagaatacctatggctctcctatgagtggctcctgcataactgatgatttaagcagcttcaacttcaagcacaagctcagagagttggaaagtgtaatgcttggccctgactctgataatcttgatagttatgacagtgccatcaacaatggaaacaacttcgttccacttgagatggacagttggagacaaacaatggtggcaatttctagcaaaaacctaaagctcatccttattgcatgtgccaaatccatttcagacaatgatttgctaatggcacaatggctgatggatgaattaaggcaggtggtgtcagtttctggtgatccggttcaacggttgggagcatacatgttggaaggacttgttgcccgattggccgcctctgggagttcaatatacaaatcattaagatgcaaagaaccagaaagtgctgaacttctctcctacatgcacatactgtatgaggtttgcccctacttcaagtttgggtatatgtctgcaaatggagccattgcagaagccatgaaagatgaagacagagttcacataattgatttccaaattggtcaaggaagccagtggataactttaattcaggcttttgcagctagacctagagggccaccccacatccggattacaggtattgatgattcaacatcggcttatgctcgcggcggtggactacacatagtgggacggaggttatcaaagcttgctgagcattttaaggtgccatttgaatttcatgctgcagctatctcaggttgtgatgttcaactacataaccttggagttcgaccaggggaagctctggctgtaaattttgcattcatgttacattacatgccggatgaaagtgtgagtactcagaatcacagggataggctgttgaggttggttaggagcctatcaccaaaggtggtgacacttgttgagcaagaatctaacacgaacactgctgcattctttccgcgtttccttgaaactctgaactattacacagcaatgtttgagtcaatagatgtgactcttcccagagagcataaagagagaatcaatgttgagcagcattgtttggcaagagacttggttaacatcatagcttgtgaaggggttgagagggtggaacgacacgaggtgcttggcaagtggaggtcaagatttgcaatggccggtttcactccttaccctttgagttcattggtgaatggtaccataaagaaattgcttgagaactacagttatagatatagacttgaagagagagatggagctctttatctgggttggatgaatagagatttggttgcttcttgcgcttggaaatgagaactgggcaatatgtgactcctcaatgttcgagggggaacaaaagcataacatgtccctcttctttttctgttccattactatgtagaagttaatgagaaaggtctcaacattaaatccaatctaattgtccattttctgtgtttcaagaatttcaattgaaattgtatgtagcatttttctttatcagcaatattaatctttcatttcaaaatcttttctggtccctgaatgtttggcttattagtggctggggaaagtgatttcctagaatattagtagagtggcttttcttagcaatggttccaacattgctgtccattcactttattagatgaaatagatagatattttactttaataaattactagtaatttactgaaagaaaagaaacacagctgtatcagattctttgaaatttatctttattctgtgggggaggagtaggcaatgggactagaattaacttggcacaatcactccttccattctgggtctgcgtactcgagggtttgtggcaatgggatcgtttcgttgctctggtggaccaacctgacagaacctttttttttttttttaattgaaaaatattaatttattgattttgttagaaatgcagttggcgtcttcgaaccccccacctcttcctcttcccttctttaaccatcgagtcaaccttatatctcctaaggaaaattcttgtgtccttctccataaaaaaatttcttcttacaggaaagtggtataccattgaaattaggatgtgacttgcatcatcggtggacctcaacatttgcatgtctcttggtgagcgaaggaagaaagaatttcttgcaatttgacatggtccaacgtgacttaaaaaggtggactttgacaaaataatagcagtgcctaataagataattgcgtaaaacagaaaagagattctaagctatccttatggttttagtacccaactcgtgacacaaaaaaatatagacgatttttcaggaaggtcttctctggtttacaagtctttctattatttttaattcaataaaaaaaaaggtaaaactccaaaaacaaataatgtctaagaagagaccctcgcactatctcccaaaagcatagactgcaccaagaatgagcataaacgtaatggatatggacccataaaattctcagcctccaaccttgacgccaattggttatcctgtttgcttggacaaagtatgagaggagtggctgtctaaatgaaccacctccaggctccaacccccagattttttttttttttttttttacccttggataaataataaattaccaatccaatatcctgttatatttagtcgagcatcgatcattacattaaagaatgaatctaaaccactgcaccaacaatcacacattttaacatatggaataacttttgctatactcaattactgcaattctgcaacgcattttgtaaatttacatggaagaaaggaagattaaagcattagtaggcacaaaacaagaattacatgcaaatagctgagtatgttcaacaatacattagaattttagatacatgtgtacgaaaatgtaaatcttatttaactcaaataataatggtatacaagttatgatatcctccaatgtagtattaattgtaatttgcatatttagtcaacctgcccaaagacaagcagagagctagaagaagagttgaaggttagagtcgaaataggaattataatcccacagtatatctgtaaagcctatgtcattgtcaaatatttatactcttctgtaactagggggccctttcaaaaatattgcaaatttagctttggaccggttctgcatcagctgcggattgcttgttaaattcactttctgtactaggagtatcatgaacggcaaccaccttaaggcaatccttacttccttctgatataggttttacctcacctttcagctgttcatttgatctacacagaactccagaacttgaatggcatataacgtcattgctgacagaatcgtctttagtagctgagttatccttttgttgttgctcacttaatttaatttcaggaccctcattagaaaggctgatcacacgaaactcaaccatatcaccagcctttgacttagtagtcgactcgccaattaggtcccctgtatcatcagtattaccctcagatttggttcctgccttgccattagtggccgttgtgcgagtatttgtagctgcattctgagtgacagtccgtccagggggaatttcatgatcatgctgtccctcataggtagttattacagtttttgaatcatgagaggccctttccacatgctttttgacagggcatccaggattcgagcatcgataataacttctggaagagtggagagaaaatgcagtcaaattaatttaaaacatttgtgaacactgtatccatgtaagcacagcatagaggggctgagagagcaaataaacatctaaaaaaagtgtaaccagtgggagaagaggcaacttgacaaatgtaaccagcagatgaagaagttgaagctagaccagaggaatcggtcattggcagatacccaatatagtgaatataccagttcagaacaaaagcattattgatacaattgccttgcttttttaaaatgctaaagaaacacaatacttctaataaaattgttcatctatgttcaaacatttgagagtttgggttgcatttcaatacctggttagaactgctaaatcattgttaaacccataaaaagtgtgacctagttgtgcggacttaagtattagccacagattataatcctacaaaacgtgcatgtgggatacactttgaaaatgatataaaaggaaatactataatcacttcctgttggtttcaagaaggcgaagaataactcaaacagatctttagactggaagctaatgaaattaatttatagtcacaactcacagggcttcaggctagctcttccaaggcagaatgatataatatggatcaatataaacacattctaacacacacaacaccagcagaaaataggactgcattttgaaatgaaaagttaacatgtaccttgggtttgtattccctttaactagcttctgcccatatttgcgccagcgatacccgtcatttaccagatcaacctcacttgaagtctgaacaacaacaacacgagattcccgagttgacatgtcaactctagtgacatcagcattactattgtctttcttcctgcttggtatcaatttggcagtaaaggttagctatcgcatatatatatcaacacaaattttaaaaaatagtgatataacgtacagccgctttgactcaggttccttgttatcatgaaccagattctttgccttagtcaattgtaaatgtgcagctttcaactcattaactggggaaactgttgcaggaggaaaggattgtaaaggcttgatctgttgaggcatacatccatgctcaacggatgctttgtcttcatgtatgatgtcaaaaaatacattaagatctttcctacagaggcatagaaacaaaagtacagacaaagtgtactgctcaccttccacattggctagagagggtttgtgaagtgcttgttcaacaacaggaagaacacactcaactgatactgtgtttaattgaggtctaggatgattatgctgaccgatacaaatggaatccgtgatatgtccattatttgactgctgcaattgtttttttgcctggcagtttggatgtgtacacttgtaatagctccttataaattcattccccttaacatgtttctgaccatattttcgccagttatagccatcttttgataccttttcacgtattatagagggacattcctgactggactgcgatcgaggcaattcatgcgaaagagtatcagggctctgcaaaggtttcccaagtggtaaagagcatgtgcttccttcttgatctgattccaaggcacaagcagtagcatatgaatccttcccttcatttttaactacaatagaaagaatacttgttgcttcctctggtttggacagatcatttttagtatcatgaccttgtgacaatgtcgtatcactatcaggactcactctctgctgcaattgatcagaagggatattttgatccgcacttttgtctgtagaaaccatgtgaacctttttctaatatatcagaaggaaacaggtctagtttcattaactgcttccatgaatggcttgaaccttgaacaagcaatgcgtgcttgtggctgttcaaagctgacacgtttaaaaagcaattagcaaaacacaaatttcggtgccctgtgacagcaatatcatgaatatgaatagtgtgggtcgagaaaattttcttttcatacgtggttcctttattgaacttttagcagttttgttaatgtcaaccctgttctaaggaacaaaatgtggaaagtttatattggaataaaaaagtagttattgtaaaaactctctttctacttttagtcgctcaacagctgatcttaaaaaaacccaacttttattagtagaagccgcaagataaaactcactttaaacatgtgaaaccatttcagccatgatggaccaaatagaatatctacatacatattccgaatcggagtcttaacgcaatactatatacaaacagacacatgcataaagccatgttaattaattttcagatagaaaggagctcaaatctcaaacaaaaatcaatatccagctcctactttgagatcacttttaccatacagtacttaacgtcttaattactagttgaataatccaattaattacaaacacaacagttacagagatagcttattctttaatttgtatctgaaattagccgaaccaaatccagaggaaagagagagagggggaggatttcattgcttaggtctcaaaaaaaaaaaatgctattccaccttctgtggaagcatccccaaacccccacaacagttcatacctcggttagaaagaaaaaaagacccccacagattttagtatatgaagattaaaataaggggagaatttaaaaaaaaagaagaagaagaagaagaagaagaagaagaaggaagaattgaagtaggcgaaattgaatggaatatataaaaggagaaagatagcacgtgggaagcattacttacccggaattgagacctcaaaattggtgaagaggaagtgcgagttgagtaaacaaaacaagtgagggtattttggttgtgttgcagaagatgtcgtctatgttgtgggtttgggtggaaggaagcaatgggagagagtccaatgtaacatcctcatttatttgacccaaaaatcaaggcaaaggggaacaaaagtcctctctctctcctcagtttattattaattttaaagtgacacgctgacacaaacacacacaaaatatgcctttctgtgctttcatttcatttgtcaagtcttcgttcggtggttcttattttttctctcctaaaccacaatttggatttgggcctccctttttttttctcactctgagctacattcaccattgggcttatcatatcatataaaaatatactctttttttttatttgacctacacaattaatttttttttcttaatgtaacttttaatttattatgtttcacaattatttcattttgatatattaagttttaaaattttcatcatgattttttatgttttcaaaatgtaaagctccttcaccaaattggagtatagaatcatcccaaaaaatcttggtcaaagcatgcatatgccaaacctgaatacctcccgaaaataactggcaaaaaaaaaaaaacacctagtaaagaaactcaatcttgagtgaaataaataatgcggctttgaactttaccaacaaaatcatcgaaaccttagtattatgttaacttttaaattttaaaaatgaacataatgatacatttcgaaaacataaaagatcaaaatgaaaattttaaaacttaatatatcaaagcaaaataactgtgaaacataatagatcaaaagaaatattaaatcttttaaaataattgattttatactgtgacggctaaagattgtcactatctttattttattttaaaaaataaataactaaaaaattacctaaaatattaattatataaagaaacgtgtatttaggaaaaaaaataaaattttatataaaaacttacttttattgtgaagataaaaaagataaatacttatttataaaacgaaaaaacacggtttgggataaaatctgttccatgttccaatctcgctttgttttcgtgttgaacctgaaagagaatcttctccccatcaaaccctaaccctaacttacagatttgagttttgatcacacaaattcaatcaatcaatctttctcttcaccctgagaaaatgcttcaatctccagggcactcgccgctccacatctcgtcgccgtccccttcaatttcccaggtatcggcgcaaaaccctaacgatccaccatcatcatcgtgtgcgaagcaccctgcggtgctggacgaggacacgtacgttgaggcgttggagaagatcatcgagcgcgactacttccccgacatctccaagctccgcgaccgcctcgactggctcgaagccatcaaaaccggcgaccctgttgtcattcgcgaggcccaattgaagatcctcgaacgccgcgccggcacagcaaaggtaaccaatcccaatgatacttctagaacaacctcccacacacccggttccacattcgttagaaatttcacacctctcgatgagttcgacggaaaaccctctcaaagcccccgtgccccggttctcgaggctaaagagggggagaataacgatggtggggctgatacttcgcttggcctcgatcaatttatgaggaggtacacgagtgaggacaatcatagtttttcgaagattctagagaaagtgaataagaagaggaaagagaggtttgggtatttgaatgaggatgtgcagggtattgaggatgtgaagagggataggattactgatggttatggaacctcttatcagcctccgagtacccttcaagggtggaattacactgccaagaatttgttaatgtatcatcctgctgatcggggtgaggtccctttgaccgaggaggaaagagcgaatagaattaaagccgccacgaaggagatcaatcgcgggaacactaggtttcatggtaaaatgatggattctaggccaaaagatgatggaactgttgaggtgctttatgcgccagttgctggcactacgccggcgcctatgtctcttagagaaggggataagttaaagaagtatgatttggatgatttgaggaagactccaaatccgttttatttagaatctgggaagaaagctgagaatggttatagctttgttaagacaccgtcccctgctccaggtgttgatgaatccccgtttattacttggggagaaattgaggggactccgctgaggttggatctggaagatacgccacttgatattggtggtagtgctgatggtcctcattataagattccttctgcaccggcaagagattcaaaggcacattctctttctagggaggctgcacgcaagataagggagaggtcaaaaatgtttcataagcccccgttggcatcaccggttagaggggggagtgccagtccaagcatgcgtacactgtctcctgcagctcagaagtttgtgaggaatgcgtttgccaagtcctcatcttctgttgatgaaacacttcgggcaagttaccgtggttctactcctgctttggctactcctagaagtgttagtaggagtgtgtcaaggtttggtcgtgatgggagcttggcttccaggtctccatctgttagagagggctccaatcctcccttgtgatatgttgtaacatattttgaaaccatgatatgctgtatgtctccccctcccccttgatgatgtattaaagttgcaccgccatataaatttggagagaaaaaaaatctgggaataataataaacttgtgcttgctgaattttgtaacctcaacttagattgttaattcttgtagttttagccttgctcagcgattactggttgtctatgtacaaaatcttcttgatagaagttcttcagtcaattcctctatgccaaaggcattgttgtatattggattaactacgaagttactatctcacttttctgcctatttgagagattttttatgcgtctatgtgataggttttgttcttattgaatagtttcttcacgtttcttttttgcataaaaaaagtaggttctttctggtttcaccatacattttgcagttgccattcatgtagccaaatctcacatgaatctgagtgaatggcagtttgatgcttatttttatggtatggccttttagagtaattatcagataaaggttatagtcgtgcaagaattgagcctgcatgtgatgtatgtacattgtacagatcccttttcagttcttcaattgcatttacttgctccaaataaaataaacgattaatagtacaaagggaaggctgtttccatagtagggggaagacgtcctagattaggggtgttttacaatggtgaagggacaagtttgtttggtaaagaaacccatgggagccattgattctgagagaggcctgaggtgtgttccactgaaccagtcagtaacttggtcgtggtcattgttgctgaaaagatagtccccattggtttatccttatatgtagtttgcgggattgtggttgtagtcttccaaaagcattaaactttaaacacaccatgagagactcgcaagacattcactggggattacttgtggtaacatggaccagaaacagaacaagagtttcaatgaatctaaatatttcgaattgaagcatttgcctattagacatgtcgtcatcagcaagttgctgtagcttgtcaaatacgttgatgtacatctttgtcaattgatccctgataaatcatattagagccatataatagcagcgccggcaggggtatgccagaatcaacaatgaaacgataatgacgtaataatcatattcacaccaatttttaatttttgctaaaggctacaccaatagttacagtacgcataggactaatggtatttgcgagcagtttatttgaaagtatcatgaaaaaggtggtgttgttgaaaggcctacggtgtattccattgacaaatcaattactcgtttgtggttattgttgccgaaaagataagctctattgatcaactcatctgagttgcttgtttatttttacgttgtttgtgggtgcgtagtctttcaaaagtattaacaagcacgccctgataaactcacaagactacaatgttgcactataataaaaaggagaagaatttcaatagatctaaacgtttcagattaaagcatttgacaattagacatgtcgtcatcaaggtgatatagctgttgaatagattgatgcaattttcatgtcaattgaccccccccccccccccccccccccaaaaaaaatatagccttttattagagccataacgtacaggtaccgcgtgccataactcatgcatgaagagacaacgaaaataacgtaactgaagcagcttttgaataattgaaaaaacagaatcgctgaagattacaccagtagtttttgtacactttgcatagggaaaatggtatttaattggaagtatcatgattaaggggtggggttgttgaagaaaatattggaaaattcagatttcagataatacagtaagagagactgttggtaatggtggttgagcatgggtacgggctttgcctgaaacttaaatgttttgccattcttcccgtgaacgtaacaaacaagttcagaatccagatccaatgatttccattacattacgattttgcgtcatggcaaggatctcaaatgtattactacaaagtgttgaattgtgtaatttaaatttcaaattattattaagatttgttaggttgttatagtttttttattattatatttaaataggaattaaaattagatcttattattccgtattattaggatgttgttgaattgctcttatatatgtaaaaacctcatgttgagggaaaatatatgaaagagagaagggagaaatgaatgaaatgaatgaagaattattattccaatatatgcatatctgatttttaacatggtatcagagccatggttccctccatgaatgagagtcatggtatcctccatgaaaaaaaatcatgatttcctccatgaaaaaaaatcatggtttccttcatgaatgagaatcatggtatcctccttatttgttcagagtctttcttcttcataatcccaaacgtacatctccttctatctttttatcttatcttcaatgtattccatttatactcaactatctatctcctccttaaccttcaccttttccgattcctttacaagttatgattattattatcatgaatttcatttttgccttgcataacctttgcgattttggttccattttgaatcattcttgtatccatttgaaggtcattaatgtgaagtcagttgcattgttttgaatcattcacaaacaaaccctgaagtctattgacatgaacatgtgattgtttcgtccatgcacgtattccatttgaaagtcattgatgtgaaactcgttgcattgttctgaatccttcactgaccatccctgaagtctattgacatgaacatgttattgttctgaatctcttcctgtatctcaattttctttctacctcacataaccgaagcacattatggactatcttgaagcacttcttgaacctattgctgatcaaagtcattccttaaagagtgtttgaagaagcaattgacaagttgggcatgaccgatattcatgcaccaacttgaggggagtgttgaattgtattatttaaatttcaagttattattagaatttgttaggttgttacattttttattattatatttaaatagaaattaagattatatcagtttgttattattctgtattattaggatgttgttgaattactcttatatatataagaacctcatgttgagggaaaatatatcaaagaaagaaggaaggaatgaataaaatgaatgaagaattattatttcaatttatgtaaaagttaaaaactaaaaaaagtaaacggaaaaggagattgtgtgtgtacctcaacatttgccatctcattcaacaactcaatctcccttcccttgcttatttattctctacacttccgcgtagggtctcaaatatttgaggtctcagattcccaatctccgttcgccacctgttaaggtaataagcttttcttcttacgcatagattttcactattgtacttgctgcttcatgcacaatcatatcagaaattggacaaaaaaaatactacaagttaagatcattgatgtgataatgaaccgacacagagcgaaaaagtagggttatagaaaattattgaacgagtaatcagtaatatattaattcagtttcataaattccttttcagttagtttagttaagcagttagttgttagcgaggtaatcgaattcaccaccttttcccttccttccttctccttttaccaccagagagagagagattgaaaatgcctgcagagaagtcgaacagttgcgatagcgaagtggaagcgttcgtggaggttgatccaacggggaggttcgggcgttacagggatcttcttggttgcggagcagtgaagaaggtatacagagcgtttgatcaggaggaaggaatcgaggtggcgtggaatcaggttcggctgaggaacttcagcgaagacactggtctcatcaatcgccttcactctgaagttgagttgctcagaaccctcagcaacaagtacatcatcgtctgttacagcgtgtggaaggacgaggagcgccacaatatcaatttcatcactgaggtctgcacctccgggaacctcagggattaccgcaagaagcaccgccacgtctccattaaggccttcaagaaatggtccaaacaggtccttaagggattggagtatcttcatacgcatgacccctgcatcattcacagggacctaaattgcagcaacatctttgtcaacggcaacattggccaggttaataattgctttgtttttattaattagtatttctcatgctattgatgattgatgaagaaacgaaaacacagtcatgccaacatatatatgcagttctcttctttttaagcaatgattaggtggttcaaagaaaatgcagttttgttacacgatgaattagcttatgcagttatgcataacctaaaaatcagttgttggagaagctaagagaagagagcttctacaaattacaaatttgcttatgcataagctatgttttgcattgctaggttgcattttgaaaacttaaggtgtatttagttactatttccaaaatttgtttttagttttcgaaaatggaattaaacaaggtcactcatatagttgatggagggtgatgcaagacaaaaagaaagtgtagaattgaagaagagtttgaaaaacatctcttaattatttctgctttctggtaatttggaaataattttcaaaatttggatgagaagtcgattactaaataatgtggaattgttttagaaaacagtttataaaaccaaaaaagtgaatggaaataaatagaaccttgatttttgaccttggcattttgtaggtgaaaattggtgatcttggattggctgcaatagtgggacgtaaccatgcagcacattcaatcttagggacaccagagtacatggcacccgaactgtacgaggaagattacactgagatggtggacatatactcttttggaatgtgtttgctggaaatggtaacaatggaaataccctacagtgaatgtgacggtgtggccgagatatacaaaaaggtcacgatgggaatcaagcctgaggccttgagcaaagtcacagatcctgaggtgaaggaattcattgagaagtgcatagcacagccaagggcaagaccttcagccacagatctccttgaggatcctttcttttatgaactcaacaatgatgaagaatcaacgccaatcaattgaataccttcattcacacgtattcagagttcattgtttgatccttatgtccaactactttttactccaagttccaagtatattcgtatcccacaggccacaactaattgttggtcagtacatgcatttcactccagtttcactatatcagtgatgtacataacttccgcagtggactgaacaatagatgacactgtttggagaaaatgccaatccacttgttttccagctgcttccctcatttatttctggcatattctgttttacttgcttcaacagtgaaaccgttaggacttgggagggcttccttaaaattggttgcatcatctcttaagctgaaaccaacaagcttaagattaactatcaaatttagatgcttatctctgcaactacattcttgtctgtccacctaaagtgagctttcaaaattagcccggcccaatgggttaggccgatgggctttttactttgaggttcagaaacaataaggtcaaattgacccgacccaatagaccaaacaggttagcatactatgttttttaagccccaaaactaaaaactaacatgtgataggatgaataagttttgtttttggtccgcgatattaggatgaataagttataatggatggtcgttctatagatatatataggttgatttaagattataggttaatgacagttttcttaattagcaagtaattcatggtttcattttcagttgaattttgagaagtgtattcatcttgaaaacatgtgagatttaatagaaaatatgacaagaaagaaaaactttcttaaatgcacaatttcatcatattttaataataatattgtttctatcttttatatacttttttaaaattaaactacgccatttaataggtgaaaaacttttctttaaatttacatagcaaactaatcaatcatgtcatattttctaatcatgtctagaatcacaatcatttattttgtcattttggatagaagtatttgttacttatatgtagcccatttttataaaataaaaaaaaaagtatattcgttttctataaccataataaacttatcaaaaatatatcatttttattcgttttctctagctcctgcttgctccttatttatcatttcctgaaatgaataaattctactttactcgttaaataaatcgagacattatttcctttgaactaagcagcagcaatactacatataaaataggctctacaaatttcaacgagtatttgatgaattaaataataaataaaaagcataaaaatatagaaagaaaagtaaaatcatactttttaataaattatttactgaaattaaaactcataaattaatgagtaaaagttattaaattataagcttttttctcacaatatcctttttcaaaagcaattatacttaagacatgatgaaaaattaaatgtagtcatttctcttaacgaggatttaaattttagtttgtcacattgtgaagaatgagttcattccgccaattccaagtcacatatgttggtattaaattagaagttaattaaactcatcatcacttcatttcattaattagttaaaaaatttcagataataatattgagtttttaaaaatattatatgatttttttatcagattatataatataacgtgttagtgatatttcttgtatgaaaatacactgaaataaaagtttttttcttacaaaaacttaaatcaaagtttgtattacattagttatgttctacaatcatattgctatgaattagaaaatatacgaacgctctttctttgtgtattcaacaactaataaatccatcttttcaaatagttgcattttgcttaggtatgtcaataaaaatccaacctatggatatctattcgactccgccatgagttttacgtgaaaaacccatattaattgggacccaggtagagttcggatttcccaaggaagtgggattaggaatgttacttatatttttataattattaatagtgtagttacatatttatatataattctataattatatattatatgtaattgttaattatataattatttcatattttatttttataattattaaaatatagaataattattttaatagttaaataaataatattataattataatactaattataataaaatttaaaattatacatttaattaaaatataatttaacttaaatatgtttatgttatttatttttattaaattatatatatatatatatattgaattgaaatgtaattaataatttaatttataatttatttaaagtatatgaacaaagaatttaaaaaaaatgtgagatggattttctataaatttttttgaacatgataaaatctagggaagaataggattgaatttcatttttcccctcatcttttataaactcaaaacgaacttgtcccgccttttgagggacaagaatgaaaataagcaaactcgcgtttgattgctgttatccctaattttgctataagtagatgaattgtttgaaattttcattttccaatgaaataagtgagctttaaaaagaaaaaagaaaaagtaaaaacaagagaagagaagacatatattagtaacctctacagtattcaaagcatgctttttttcttctttaaatttaaagatccctccattaaaaaacaaaaaattaagagaatttcgcagtgttgacattaagaagcacaaatctgctacaaagatttggcaacagcatcatattcgtattccttggtagtttactagctgcaaatgcaaatgataaagccttccttaggcggcgtgtcaatggttcactgtctaagagatgtatattactatattagaaaagaaaaatatcaaacgtatttttcttttataaaatcatcaaagcagttgtattaatggaaatcgatcgataccagaaataccaaacttacaaatagagagattattttatatttatatcaatgaggatataaatattatataaccaatataaaaaaaatataaatattatcaaacatatatctaaaaaatagagtgtataaacagaaagaagaaagaagagagataaaaaaaatggagaaaaatgtatcaaacgcatacaatagaaaaaaaataagtaagttatatttcgattaaaatttgtaagattaaatttgagttaaatttaagtttacagaaacaactcaagtcaagtcttagcttgttattacaaaacttaatttctaagcaaaattttaatgcaatcatatttttgaaactaatcaaacatattatgaaactgagttattcttcaaaagtaagcttagcacccaaaaataatttttgaaccgttaatcaaacatgctctaaagagacaagaagaaaaatgaaatgaaaatataacagaaaatacagtaaatgcatgaccataaatgctcacaaaaaaaaatgcgtgacggtaagtcggtaataaccctattagaaattccacatctgcatatgtattggcaacttcgataaatgattacttgaattctacgaatagaaaactaatagagctgcatcaaattcctgtggattttgtagccagcctcttgatgtaagactcaattataaaaaataaaaaagtcattacggtataaaaaacgtacagcataagaatcacacgtgcaaaaacgatatatatttttttaatagaaggttacgtatcgcaaaatccggaagccgaatgtcattaagaaattataataaaatgatgggtagcttctgcaaaaaatatatgtaaaatattggtgataaattatgttacagttagagtttaattactaaaatgtacgaaaagaaaactttgttagttattatgtttggcaaaaccatcttattagctaatttaaaattaaaatctagtttaaagctgaaaatttataaataaacttattgaattaaaagtatttgacaaaattaattataaaagtaattaataactaataatataaaaatgtatttatgtaacttttgtttttgtttaatttagagaacacaagattcccttcatttaactagaatcgtgagaggcatgtgatttctagtcttaggatggtaattaagaaacatctatgttaagacttttttttctgcgttataaaggattgaactttgactactttgattgattgtaactttcttttactaatttagttaactgtttattttttgtatgataattatgcataaggtaattcaaatatttctcgagtacaagaaaaatgttagaattaaaatatatcaattacaagtaaattattggtttgcactataaaaaccatgcaagcatcgccttgtatccccattttgtgtatgagctcatttatttttattctatctctttctcattttctctatctacgggtcactatctagttgcatttatatgcaaggatgagatagtaactaatctaaatcatcattttaacccaactaacaactttctaactaattctagctatatatatccaacaccctcccaagttggtagttgtttattaacttttacagcatgagataaataatacaaaccgaaataacgcagtaagaaggacggaagaaagaagagaggggagaatggtgagttcacctcaaatctgcaaagactttgttaaggagaatggatggttatagggttcaaagactttgttaaggagaggtataatagttatttgtcttcatatgataggttccaacacttgatgatcaaatatagtgttggtctgattgcaagcttttcggaagaggaagtcaaggcagcgatttgggactgtgaggggagcaaaagcctgggtcctgacggatttattttcaaattcgttaggcacttctgggatactcttaactcggacattatgagggtcatggcagaattctgtagatatggtcgcttttcagttggtggtaatgcgtcatttcttgcgctcatccccaaaaaggagactccacaaggtgtgggggattacagaccaatctctttgattgtctgcttatatataaagtggtggtgaaggataaacattcaacaaagctcttttgtgtaagtggtttggtcctggtccctatatggaatgggaaatccctatggaagaagaactgctgcagctattacaaatttggaaaccgaaaaggactggtctagatcactgggtgtggagagtattagtattaccctcggagggatattcgataaagggagcatatacactaattcaaaacttgatgattgatgaccactcaagtttttttaatgctttgtggaaggtaaaagcaccatcaaaggtgcttgtgtttaggtggcgtgtgacactagacaaaattcaatccaaggaagctttgttgagaaggaatataggtgtggctgaggaaggattgttatgtaaactgtgtaatgctgagactgaatctgcatttcatttgttttttcttactccttctcatacaaggtgtggcaaagctgttatggctggcttggcctacaacaagctctccctacaatctgtgttgcttacctttggagtcaccatgggctttgtagagggaatatggaccatttgtgctggatgggaatttggatgcctgttctatggtctatctggactcataggaatcatgtaatttttagagaggcagaaccgtgtatacaacaggtgctaagaagccacgagcatccttttcctttttttgaatggatttctaaccccttgctttgtctgaattcgatatcataattgttggtgctcattgtttccctgtcggtggagtcttgtgatgtatagaaactttcccttctataatggatgtataagggtctaggaagattgttaatttcgtgcatcatttttttaaaaaaaatttgtatctcgtacttatgtatctctttcgtgacttgcaataataaataatagtttaataaaattcacatttttcttaaaaaaacaatgtaggaattgagaagatgttgaactcatatataagcaaatacacaagtgaacaataatgacaactaaggaaagctcaactactaagtagaagtcacaatcattgtttaaccacataacaaatgcaaaccaatatatttaaccaaacaagtggaagataagtacattattaacccacttgacagaaacaatcaacatcttcaatcactgagagagagatattaaccattctaagtagaagtcgtatcgtatgtttaatcattgaacatgtatctgaaaaatgagaatgcacacatatatgtaaacgatcaagaatcatgaagaaaggctacaatggactttacaaattttagaattacatgtttactcaaatattctacaatataaatataaatttataaacacaacataaatcatgctattactaaataagataaaatccaaaaaaagaaattcaattttgcaacgcatcatgtacttttcaaagagtggggaaaagtaaaatattggatccaggggtccgtggttgaaaggaagcaaaacccaataaccaaagcaccccaatttgagtagccgtgccgtcttgggcgttaggcatacggcacataaaggaaccacaaaacttcacatgcacttcaccatcttcttttcctttgcaatattttaatcctatcatttcctcaattgcctatttatttcatttcatacccttgcatttcttttttcccaatacacccaaattgttcttttatgaaaacctaaaccaaatccaacgtaactttgtgtaaactgtttggtcccatcatttccccaaatgcctcatcagccatcaattaaggccctatacgttgacaaagacaatcgagactgaaagtttcagccgttggatacgttatactaaaagactaaaattattacaatgacactaattaagcaaataaacaaaaaaaaatagttaaaattgcaaaacacatatttttaaataattaaaaatatttaataaaatattaactaattttctagtataggttattgggtatcctatgttagtttaataatacaattgtagaactaagggggtctaatctcttaattaaataagatatatatgtaagtgttataaatctcctatactttatttgattttcaatgacaaaaaaaaaatatcattacaagtgtcaatattttttctttaaataatatttaatatagttacatatataaaactaaaatttatcaaactgaaatagtttcataccaattgattcatccactaagtattaactaattaatttgatggctggttaacataatactcatgaattttaggagtagggttttatggttgtacatacacaaacttaaagtgcgagattgagatgttaggatgcatgaaaagtcaccctattctattggccgaggccgccaagttgtagcccaagaattcaagtacccaacattcgagaacgtttttgaagccttaaagtttggagttcgagtttcactcgtgtgcatgttgactttgactactgcaaggtgaataatagtacaaatccagcaagaatatgttggggacaaactcctcaaatctcacttcaccacactacttttctttctttaacatcagaactctgctgctctagttaattccttaccagataaggattcagaatcatatgcattcgtttagtcacagttagaataagtagcatccattgtcagaagtagcactaacatggaggttgcgagtccaaaagattattctgttgcttctagtccttactcttcacctaacattggagccttgctcaagatcaaggtcatcacatggtaatatatacatgtcattgatcattcattccatttccacgtgtggttatatgtctgaagtttatctcatgcacttcgatattttgtcacaggagccaacaaacaggtttacctgtttctgtccgtgttcgagttaaagacaagatattcaacctgcataaagtaagtttagacacaattggaatccaagaatgtttcacatagcttaccagtaactaccttaattattgatttgcattttgtgtttattgcagtttcctttgacttcaaagagtggatacttcaagaagaggttaaacaatgcatctgaggttgagcttccggaaacattccctggaggaccagaaacctttgagatgattgccatgttcgtttatggatcctccacattgattgacccttttaacgttgtggcccttaggtgtgcagcagagtttcttgaaatgactgaagatcactgttcgggcaacctttgtgaacggtttgatctttatctgaatcaagttgtgttgcaaagttgggatgacacccttattgcacttcaaaggtgccagatgctgcttccttggtctgaagatctgttaatagtgagtcgctgcattgaatctcttgccttcatggcatgcatggaggtgcttgatccagaaagaaggagagacactcctgttgtgacagtggaagagttggcttccaaagattggagctgtgaaataatgaaggatgatgctgtgagccaagacctgtggatgagggatctgattgctctaccctttggctttttcaaaagggttatagggtctttgaggaaacaaggaatgaaggagaagtatgtgagtcccatcattgttttctatgcaaacaaatgggtgctctctaaaaagacgcgtcaattttgggagagttcctgtgacaagattggggagggtggcatgaatagcaaagcttctgtgattctacaaggtgttgttgatcttcttccagtgggtgataaggctaggaaagtgattccagtggggttttattttgccttgctttctagatctcttgagttggggttgaggactgaaagcaaggcaaagttacaagaccaaattacatcacttttgcacttttctcaagtggaggattttcttcttccagaaagtggagcagagttaatgtcctctagcatggagttggtgactatggaaagcataatttcagcatatgtagcatctagctcacgtgtaaaccataccccagaagctagcaattacagggttgcggagttgtgggatgcatatttattcaaaatagctgcagatccagatatgggaccaaagagatttatggaactcattgaaagggtaccaccatcttatagacagaatcattaccccctttacaaaacaatcaacagctttctcaaggtaagcaagcattcagcattcctcaaaagcttcttaaaaagtaggactcatcaattaaactacattagttgattacacatgctctcatgccaataatactatccgtttaggaactgaacactataatgaatgttcagcattctacctagtggtctaactgaataattaactagaatgatacaataatcatggtccttagaataagagaaataatgagtaaatactatttacaagcttagcaaaagttgatcatagctcatttcccaacttatgtcaaagaccaatcattaaaaaagaacaatacaatttcagctttaacatatttcgcttttttctttctttttatttatttattgtagacacattcaggtatttcccaagatgataagggagccgtgtgcaagtatctggactgtcaaaggttatcacaagaggcatgcattgaagctgttcaagacgaattgatgcctctacgtctaattgtccaagcactttttgttcaacaactcaatacacacaaagccttcaaagaatgctcagattcatttagatatgcacattgtggagacatgtcaggaagcctatcaagctctaggtatccatattctgcaagtcagaatctaggaaagagcccatccactgatggacctgagctcagtagcaggccattgagcttcctgctgcagaaagacaatgtgatgcagaatttcaagttctcaactacggaatatgagtcaacaagcttcagaatccaaaatcttgaacaagaactcatgtccttgaaaaaaagccttaaattgcacaacattgttacaaaagcagaaccaaatttgatcaaaagccagaagatgaagccgtgtggcttagaaactcgatcactgagcaaaaggagcaacccaattggacaagcgactagttgcatcagttctgtaaactttgcttcacaaagaaggtatgcaaacaggctactcaaggtctttcgccgcataactttgtctggaagtcggaaactgaagagaaaaccgggaactcctagtcaattgtccaagtaattgtagcataagaactttactattgatgtgtatgaatatggatacaaatagaaccacgtagagttggagactcaattctctttttccttttatcacatttcattgaaaataataagtaaacaggaaaagagggggtgagagaaagaaagaatgaaaaggaacaaaagaaagaaaatgttattggccatttaataggctaatatacttcattaacattcataacatatatgtccattaaaattatataaaggataaggttgtagatattgaacattgaagagctgacaaaaaagattggggttcagatggcttcaacttgtcatatttgagtacaaaacactattggtttaacttgacatgataggatcatgaagaaactctgctattatatatatatatatatatataactaggccatgtgaaattccacaaaacttgcagctccattgcatgatttgcatcttggacaatggcatagtgatggtggctgacattgacaggcatgcagacatcaacccactaatcagttttgtctgtctttttgtcttcctcaaagtaaagaaggcacatttgtaacataattcactactggctgtcaacttagttacagtatcaacaattggtgtgatgtgaagcactgaaccaaaagcttctcctgaatggtttaatcacccaccagtaagatgagcatttgtttactaagattcacagtgacttatctgcacagttcataaacaaagctaaattagcataactgaatagaaaacactagtagttagagtacaatgggtaaacattatagaaccataaatatcacttcattatgaaacggtgcattaattactgcattatagccaaaaagttaaaaacaccaaacttcattcatagtgtactttcagtaactcccatatttggcccaaccaatttattaatcccttttgagattttttttgttatataatattacccttaagtcggacctccttacccttaattatatagtcaatgctatctctctaacatgtcagtcgatggcaagggtaaccaatgatggacttgtaacttttggaagaatagttcctttctattgttccaccttgcaagcttcataattgaaccgaaaacacaggcatcaaacaaataaaggctacattctaggcattttttttaatgctgaatactttttgtgagttttctcgctttaaggtaatctcaatttctttttttgtttattagatattcttatattcttggtgtacgagacagattccttgtgatttacaggttaagtcctccttacaaatattataatctcaattggtggccaccgtttattttgatcactgcaacttattatcttttgaatctataggcgaaaaaaaaatccttatgacgtgtgaactgtgattagcatatatgaaatgaatatcatcttttcactctacaaaaatatcatccttttgtattacaagaaagtcaactagacaattgcaggggaacgttcgcactgcctttattgtccctttttttcttctttctcgaagctaaaatatacattgtttatgttttagattatattcagttggatcaattgtgtttcataatttcatggaagttaatttaacgagacaaattttaagtctccaattagttaaaaaaaattaaatcatgtcctaaaataaataaaaaataattatttaaaaaaaatcgtttaaactcattttaaaaacgtaaatgattacattaaactttttaaaaaataaataactaaattaaatattatagataacgtaaagaactaagagtatattatttagccttttctaaatgacaacagatttggcaatgcaaagcaaggaaatttaatgcatatatcttgtatctttgctagattttatcattgccatatttttttcacaagataactgaaaaacggctcaggtgagaatattataattatttttttgactgaatattataattatttgggaaatcaaaataatgaatatgtatcattaagtcttacctaaatggttaacgattaaataataaacaaatgtatccttttaaatgtcatgtaactattaacatttgaattattttatacaaattttttatcttaattgtttttgtatggtggtatgatcaatatttataattctcatacttttaatataaatgttgttctcattatatatatcccaaataatataatgaaaaaacgaggcaggtaaaacatattatttaaatcacttcattttctgttttaaaaaaatcaagtcatttttttttcaataggggaaaatatcattttattttgttttgagtaaaggataaattttattttatcttaaaaatctgtttcatttgggagggaacatattcggattaagttcctttttattatatagttcaaaaaacttttaatgtctccagctagcataagaaaatagtacttgtttgggttttcttaatttatgcctccctttttctttgttggtattttatgtctcactagtcacgttaataaaggaatgaaaaggaaagggggggaaaaaaaaaaagaggtaatggttattgaaaactggaaattgagaagaaataatgttaattattctacccaaattacttacaatatttttaaaatttaactagcattttaacttatacactgtactcaataaatatttaattttatataattaatttttcataagtgaacgtttaatataacaattatattttaaaattataatataaatttatttttagttattgaattttaaaacattaaaattgaatttaaaaaaaatattaaaattgattttatattcatctaataattaaaatatattgatagtataaaaaattgatattttatttaataataaattatcatgtacagtaagattattgagttatttttttttttttgtagtaaaaggaaaaaggagcacaaattattaaaaataaaaaactacatccttgtgaaagctactcccactaaatcagctaacaataacgtggtgatttctgatggaggaaaatcagaaatcgtgagacgatcttgagatagagctcccatttttgccaataattttataataattactttaataaatttatttagagtaattttaattgactaacaatatttttttttacatgatagtgtataaaaaataaatactaaaagtcaatattaaagttttttttattcgtaaaaatggaacaagcctcaaccaagatccattggtaatattaaaatgtgaatactaattatggaaatgaattttgaattttaattaagaattaatactaaaaacacttgagaaaagtgtacatgtgttttccttcatcctccacgtgacacaggatcgtgctccgacccaactctgttcaataatttaaatttaccaccgccatatcaatatctaccatttctgctgcatcgttatatatgtccatcccatcatctaccttcttcgagtttaaggttaccaacaacatttcactataatttttttttttttgcactattctcaaattatcaaactccactgttaattcgtttgatccttcaccacgttgtcgtagtcttttccaacatgcatgctgagcttgatgtatatgtaatttggataagactcttctcgttttaacattttttaaaatgagtaagagtgtgtttatatttaatttaattaatgtattatgcatttttcttaacatattaaatttaaataattaatacatatttaattattcattttacggaaaggagaagaaaaatgaatggattaaaaaagcaaaataaaaaaaatcatgttattgcatgataaaagcagaagatgaaaaggcatttcataaatatgcatgtttcttgtagtgaacagaaaattttaaatagcttgatcaaaactcgcttagcaagtacttcctaaaaagaatacttctatagatgtaatatttatattgctaaatgaaacacgatgacatgtcacttaatgagaacaagatgagaaataatgtgtctcttaacaaaacactttgacctaattctcacatggacttgccttggatgttgtatggtagttggaagctctctcatgactccttcatccatcttcttcatttcttactcatttttggctctacatgtgtctaagaggagctaaactcatccttgttggggttggatgtaactaagttgactcttatgtactatttataacttaatttgattttgcacttcaatattagttcttattccatgcttaaagctttgtatgatttgatcatttatattttgatgtttaatttcattcatattggaaaacactctttaaaccttgaactaaagttgaacacctaatgaaccttattgctaggaacaaggcatggtttattagtcatcttaagatcctgaatctcaaagcaagtaccttaattaagtcatctaaagtattaatgttttacaaggacaattaggctctttcacacaaggaatgcaggtttgagtgtacttatgaactgattcatggattgatgttaatttttgaagtgtaaaattgattaaatgttaatgagttccaggaagaaattaatttaacaataaacattttctccatatttgatatgtacattttctacactttatctattagataaaaattcaaaaaaatcttaatatttattatttatagtcttgtttgattatgtttagaacgattaaaatttccttcattccaaattaggggtaagcaacggttggtcacgattgggttcgggcagaaaatgcttaaaatgttgaaattcaaccacttcaaatgttgaaccgcaaccaaccatttggaccttcgaaatttgtcggattcaagtaacacggttgacggattacacgggtgggttatgtcagtttcaagagaggaggtaacgcgaagggaaatggaatgtcgaggaaacctatggttgttggtgtacactagaaaaagacttcatggtggttggtggatgcagggaagaaaccttgtggtggttggtggatgtgcgagatggtttttccacagcaccttgcttaagaatggtaagacttcacgaaaaaatggcatgaaaaccttcactgaaatttcaaaaaaaaaagaaggagaaagaaagaactatgaacaaagaaaaaagaaagagagttgagaagaagaaaggaaggtggagagaaagaactttgatcaaaaaagttacttgatatatttgaatgaataaacaaattaagcttaaaaagcatgattcaatatttttgctggtaccaatagaatattttttattgtgattgattgccaatgcaaacaatgaaagaaagaagaagaaaaatgattgattggagaaaataaaaatgaaaaaaaaatcatgttgtcgcaagataaaagtagaataaaataaaaatgtagtcaataataaaacaatagtaaaacaagaatccttattttctaggttacataaaaaagaatccttatattaaggacattagaattttctttaagctaataaatcatctttgatctaattagttacttaatacctttgaatgaataaaaaatttaagcttaaagaaataaagttacttatgatttaaatttggtctaaactaaaatatttgatataaaaatattatacaaaattttaattataaaaatattttatttaatattttattatacaatgcgacatttgacttactgattcaatattttgaccaatcttatttagataaatttatctataaagaataagtcaacatcatcaacatttacatcaacaacacctttaatccaaaataattggggtcggtagtagatgaactcactaatagatacgaggaggttgaaaaaaaggaaggaaaaaaaaaagagaagggaatcaatcttaaaagattctaaaaaggataagtaaatacaaaaatataaaatgaatgagacttaagataaaattatcttatgtatttaacttttatagagatcctctggtctaaatttttttaaaaataaagtatgtaagttgattgtagttgacaaaagaaattcaatccattttaccttgttttcatgttcatcaagaagtttatccaaaaagaacttagaactaatggcttaatcaaatttaatacatttcaacattagttaatatcaaacattttccatttttatgtttgacactcaatggcagtaaaaaaaataaaaatgaatgcgtacaaaaagaaaagaaaaattatcttgttgctagatgaaagggaaagaagatgaaaatgcatttaataagaaaacaaaagtaaaaaacaatcctttgagatatttttagtatattagagtttgtctttaaagactaataaaccaagtttgatataatatgttacttgatatatttgagtgaataacaaatttaagcataaaaaatatgattcaaatttagtattaattttttaaaagttaaaatttagtattaatttaagatacatacatgttaataattttaatataaaaatttaatcgtaaaacatttatatatatttttattatgcaatttgatcgatgacttatttattcaatatattttgagtaagtgaattaactcattaagaaccacgaaggttggcctatatgagagtttggaataatatgcatgagttgaggttataggatcaaatcttagtgtgattattgtaaaaaaaaaaaaaactcatcaaatttaatacattttactatttgttagtattaagagattttgtttttctttatcttttttgattgacagtcaacacaaataaagaaaaaaacacattgcacataaaaaagaaggatgaaaaaaatcatgttgtaaaataaaattagaagaaaataaaaacacattaaataagaaaacaataattaaaaagaacccttatattatggatatttgaatttttcttgaagttaacaaaccaactttgacctaataagttacctgatacatttaagtgaatacaaaatttaagcttgaagaaataaaagtaaagtatgatttaaatttggtctaataaactaaaatgtttgcataataataaatttcatataatttctaattataaaaaatatttttattttattttattatcaatttgaccaatgtcctactgatttaatatttttttaaggtcttatttggattttgctataaatatttacaggataagaaaattaatatttcccacataatacattttttgggagggacaatgagctttgaattaactaaactacaaaatgagaattagtcccatagtcgataaaaaatattaaagttagtggtgcatttaacttttatagtaacattttcatttaactactttgaaaactaaagtgtacacatattgattttagtttataggaataactcaattcattttactttcttatttttttctataaatattttttagaactttatttaaatagaacctaagtaatttacttaatcatatttaatacatttaaccattggtcaatactaaagatttttcatttttatgatttgcaaccatgggcaaattttaatacattttatcattggtcaataccaaagattttccaattttaggatttgcgatcgtcgataacctgtcgttgataaacaccaataaaataagaagaaaatgaatgcacaaaaaaggaaaaataaaaatcataaaagaaagataaaaacataagaacattgaaatgcaattaaaagggagtgtatttgattgagtttttaaatgattttagaagaccttttatgataaagaaatattatagtatttagtcaagattttcaagtagtataaatattatgatattgaatgttacactcatctaataatctatttgaactctttagacttttccatactttctccgattacacattatatattttcctttagctgaagacaatacaattattgatcatttctttcttcctatcatttaagaataatattatttacaaatatttacaaaatattacttgattagcttaataggtattcttgtgatattaaatttcttgattgatatgataactagtaactactcctttgaaataacttgattattaattcaaattgggagtcacaagaaagaaacaacaaagaaaaaagaattataattaattattaaagatgtgattgatagataattttattttttacgtatgtgataatggtttggttcctaacttttatgtatgaaaaatatcttttgagagatattcattatgtaaaggatctcaatacctcaaaaaaaaattagtcattgacttttggtctaaaaatatattgattcacataaaaaattaaaaaatcatatttgtttaatttttatttattaaaatcttatatttgttttgttatattattcattgactcttatagtcttaaacatttgttaaaaatccataagatcttttcaaattttatattcataaattacttttaatcttataaatcctcataatgatctaaatttaaactatcaaaatctcgattataaagtcttaatttttattataagtcattatattctctttcctttcaagttttatattttcataaattacttttaatcttataaatctttatgatataaatttaaactatcaaatcttgattataaatgtcttaatttttattatgagtcattatattctttattttaaaatttacaggacttttttttaatatcccatttcagtacattgttatataaattaaaattgaattgttttaatacttactgatatatacagatttagataataaatgcaactaagtaaattcaaaaaacaatcagacaaaagaacaacgatctcagaaattatttttttggtaatgatctcagaaattatttgaacatgatttttatttaaaactagcaggtaaaaataagaagcaaaaaaactagattcccatttttattcttcactaatttgaaatcaaactggtaaaaaaataataatagggaaagaaaaaagaaaaatagaaaaaagggaagaaagaaaatcatcatcttccatttgcagaggcactatataatggtcataccacatctcgcagcttctttctcgtctcggctttctccttacaaacttcttccgatgtgtttctctctttctctctccgtacttttgatttcttcataaaattttgcaatcggtttgacaactgaatttgcatttggtaatcaaattaataattgaaaaaaaagaagaaaaaaaagggtggggaggcatagccagatattgaacctgccctctgttcttaatctcattgtgcctcccctcagatctcgtcttcaatcggtgggtttcgacggaatcttgattgaagttttgatctttgttcaattgggtccgcctttggatctttgattcttgaaactttttgtgggttttctccaggagtgctttgccttcattgattcactgcttgatgattgttgatgaaggatccgttgtttcgtaactgattccgacaatatctatttttgcatcgttaatacagtctctcagtttgtcttaatttatggtattgcttgtaatgctttttttttttttttttggtcgtgctagggactatttgtatttcaacattttgttaaatgataatgctatcatgtttttgattttattctacccggatttgtgcgcatttcatcccacaccaggattttgtttttatcttgttttctatgagtcattaaaaaaatgaaataaaattatgctatagcctatagatatatgtaaggaattggattggatccgtcaggaacacgcctttttcttataccctatggttaggtgctttagaaggttggctttgtccatttctaatgatgctgctgccacttgcatttctaagtttttgaactcaaatgctaattggacgaggcgtgtcttttgcttgtagataaaatgcaatcagataatggcaagttattcatcggtgggatatcatgggacacaaatgaagagcgactcagggagtatttcagtacttatggggaagttgtggaagcagtgataatgaaggatcggacaacaggtagagccaggggatttggtttcgttgttttttctgacccagctgttgcagaaatagtcataaaagagaagcacagcattgacggaaggatggtaatcttcttgtttacccccttttaagtctaaagtttgcattttgacattacggttctctttttgaattatgcaacattggaaggtagcagttttgatgttgaaatgttgttatattcacaatctcaaaatatcttagctagattttaaaatggagcaggagtacattaaatttttccacatattttatattctctaatcttttgatttttgttattgttctcttttctaagcatctgtcataaggattgacagatcttgaaaacttttttattttctgatatacagtaaatactcaatactgtttcctctcttgctaggttgaggctaagaaagctgttcctagggatgatcagaacatactgagtagaaacagtggcagcatccatggttctcctggtccaggtcgcactagaaagatatttgttggaggtttagcatcaacagtgacagagagtgatttcaagaagtactttgatcagtttgggactataacagatgttgtcgttatgtatgatcacaacactcagaggccgagaggctttggatttatcacttatgattctgaggaggcagttgacaaggtcttacttaagacatttcatgaattgaatggtaaaatggttgaggtcaagcgagcagttcctaaggagttatcgccaggaccaagccgcaccccactcggtggatataactatggtcttactagggtcaatagtttcttaaatggcttcactcaggggtattctccaagtacagttgcaggctatggacttcgagcggatgatagattcagtcatgttgccggtggtcgaagtggatttgcttcatttggatcaggttatggaatgagcatgaattttgaacctggtttgaatgctggatttggagggaatgcaaatttcaatagcaatcttagctatgatcggggagtaaatccttattttatcggcagctccaataggtttggcagtcctgttggatatgagagtggaaatggaggaaacaattctttcttcagttctgtgactcgaaatttgtggggtaatggtggccttagttatggaacaagttctgcaaactccaatgcatacattggatcagggagtgggagtgttggagggaacacatttggcaacactggagtcaactggagttcttcagcaatttccgggcagcagggaggagggaacaatatgtcacaaagtagtggcaacctgggatatggaggtggtgacaacaattatggtttggggactggagggtatggaagaagcactggtgccacttttgcaccaacatcttcatactctgcatcaaatggcggtgttgatggggcttttgcagacttttacaataatagttcagtttatggggaccccacttggcgatcttcaaattctgagagagatggatctagtccctttggttatggacttggtggcacagcttcagatgtttctgccaagagttctcctggttatgttggtggttacactgttaataagaggcagccaaataggggtaagagttacaataatttagacaaatgcccttttctagatactaggcattttgaggaaatgttatctgattgatctctgattaatgttttatcctctttgttaagtttgctattataatggaacaattgtaattggttgtttatactatgttcaacccattacttaaatttaaatagttaggtgaagttgtggatgcatatttttgaaagcttgtttctcagaacagtgttcagtgacattcaatcacggacattattgctctatagttattcaatagaaggggtgacattgactaaataagtaattatctatgtttgagttcattatacttttgccccattccttgttttccgaactccattcccttaattattgtatctgtgtgccttatttgttgtataagtaagcttcttggaacactagcacatctttagataaccataatgtcattcagatgccagaattctaactacatttatatgggttttctttctaatcttatgtggaatatacttcaaggatgtgaaaattgagaggtcccataggaatcaaaaattaagcttgaaattgaaagatagctattactgaaacaagcaaagttaaccttcatagaaatatgtatatgattgtcattgttccacaacctaactttgttttagcatggcttggtttagaggaggaaggggttcagattatagatggactttctaccatacctaacagtagaaaaaaaagtccctagtttgagggacgaggaaagtaagcaaggtgcacagtgttgttttatagttttattaaacaacaacaaagcctctactagatgagatcggcaacatggatcacataacaccatttggcacggttaaaaaccaaagctttaggaataatattttgcctgagatcctcttacaacttcctccaatgtcccttttggtcttcctctttcccttttcatgagactaaatcatgcaatatactcctaattgtcgccttgtgtgggcccttttgtacattccaagccaacttaaccaattttttgtcatcttttcctcatttggtgccacaccaaacttttctcgtatatagtcattccgtattttgccctttcttgtatgactgctcatcaatctttacattctcatttttgctactcccacttttctctcatgttgtccctttaaagcccaacattcactgccatatagtataactggacgtataattgtgtaatgaaacttgtctttgagtttggtaggtactttgtgatcacaaacaactctcaatgcctttctccatttaagccatcccgcttgtatgacatcctcatattttttccatcattttgtatgattgaacccaaatatttaaacttagaaagctgtgatacgatttattcaatttttaattccgagtcatattactcttgtctcttgctaaaattgcaatgcatatactttgtcttactcctactcaagcaaaatcctttgtttccaaagtctgcctccaaagttcaagcttaatgttaattgcttcccttgattcctcaatcaagattatatcatctgcaaaatgcatgcaattaggataattttttgtatgtccttgataagcatccaagactagattaaacaagtaaggactcaagccttaagccttgatgtaatcctgtctcaataggatagtccttagtttcaccacttggagttctcacactagtagttaccacttcatacatgtcttgtatagcatgaattataagccttttccaagtcaataaaaaccatatgtaagtctctttattactgtacctttccgtcaaccagaaataacacctttgtgacataaaatcaaattgattctctacaatccttgtttcttctcttaatctctatgctccatcaccttttcctctaatttcatagtgactcataatttcaaaatgttgatttatattttatagaaaagaataaggaggggtatatgcttttatatattataaagtttctattagtgattcagatgtttattggtataagtagagtttgaattctgctagatgcaaggctcaaccttacacatacttttacaatgtgcacatgcagaagtattttaatgaaattaagttctcaaactaaaagtattacttcattcatgaacagaagttgtagaaactgtataacttaataaaggtgaggtttcaatggagattatcataatgactcttgtctaattgcatcttttccaatgaaaacagttgggtatggatctgtggattcaaaatctgcatggttgattgtaattttgtgagttagtagatggagaaaaaaaaaaaaagagaaaaaatttgtaaacatgttgcccataattccattgaagtgttagaaatgatcattttcatatatatagatatatattccgggctcttttcaacagtattgccttcttttttcgagtgtcttatcacaaaacttgaatgaggggaagaaaactgacttctggatagcaatcatagatgtcatgtaaacatcatactagaactagttcttcgatgtccttttccttctgaattgtctgatagattttagatgttttgctgcatgtgtttagagtatgcaatcatgatttgcatgcaatcaaatcttcataggagagttgatttttttttttttgtctgttatcccctggtgctctacccctcacacttagagggcaatataagaagttttaccctcttgatgtttaatagttagtcaagagggctgatataaccccaagttctttgtaatagagtagaatctgttccacatcattttcttctttatgatatattgatatgttatctatgttcaaattttttccaacaatgaatctcaatttctttagtcttggtaagttatggaagttctttatgatatgaatttatctttgatcttttgtcttttagcaaaacttgactacaattcacttatactctttctgctgtatgctcctttgtagtgctccattttttcacatcaacatataaattggatggaaataaatattgatgctttatacttgtgaagtgtcctttcaatttttcattcagttgtcttgtatgccaacactgataaacttgtatatttacttcaggaatcgctacataggaagatcgttttgatgacacgaacttgtaggtgaagataatccagtgaagcaggtgaattgtgaattttgcacaccactgttgttactgaatttgggtttaagacgcaagatatttggttttctagagctaactggagtgcctgttttgagggttcagatatagagatagattacaagggaatgttaaggcttgagtttttgagttactgtttaggttatgggatttgagtgagatgtaaaatctgattgcgggatatagcggaagtgtatcatgcatcacttgtgaggaagcaatataaaaaagatggacagagcatttcttttttcctttttctttttgggtagattttttgccttttatgtcttgcaaagttgtgggttcttctcaggaattgtttgtttcttcatccgttcattttggtttgcttttagcagattgtatctgaggtttttgtttattactagtgtgaaacattgaagggatacccatctagggtcccgtgaataagttaccatatgttctgattctttttctaaaggggaatattttatgctacaaattcaaactgtatgtgataaatggatttatttttccccatttgaatattttccaaattttgtgaactatgtagtattttattacacttgcttttatagatattttaatactatagtttagtttaccccattgccattcttaacacagctaaatcgtttaagatagaattgtagaactttgtaagcgtcattaataaagcaatgcacccaataaaaaaaaaaaaaattaaatatagattaattcttttagaaatactagactggattttctgttcagtgggtgtttgatgtattagaacaaccattctctttatctattaaattaaaatgaaaatgaaaagtcacaattaaaatattttaaattcaaattaaagtatcatttaaccataaaattaaatatgagatttgtggcagtcatgtaggtggatttgtggcagtcatttaggtgataatgatggtggtcatgacaacaaccatggagacgatcttgatgtaaattaaatctttaaaatatttgattttctttaataaatcttagaaattttataattaaataatgttttaatttgaatgttctcattcttacataacaaagtcattttcgtatgaaacattatatatatatatatatatatatatatatatatatatatatatgtatttctaaatttatatccttaattatttttgttaaaaataattttatccttaattaataattaaagtgatttttttttttaaattacattaatgaggtcaatttaatccttcactaatattctatttgattaaactaaatcaatagttattgtgtattgtaacttttgatcaatgactaaataagattaaatcaaattaaaaatgataatgaaattaaaatcttgatataatggtttaaaatacttcaaacttcctttactttaagtatagatatataaaatatatagatagatagataaattggatttaggtgttgtacttgcctgtttagcacatccttcttgagtagagattagaaactgttccgatcttcaatcttcctgagggttaatgttaggcatttaagatattgtttttctttaatttaactcttgtggtctaaatatctaattattgcaggactttttgatggatggtaataaacaattttttttggcttaattgcttatttattttgttcagttttattccactattaataaatgattcaatttgatctcttaaatctttaaaatgattcaattaggttccttaatttgtaaaaagttctaacagcatgagaccaatttagacgaaaaaggactaaaatgcatggtatttgaaaaattaaggaaccaaattgagtcatttattaatagtgagacaaaattaaattaaattaataaataatgaggccaaataaacgattaaatttggttccttattttttttttgttttagctgaaaaatgacttttttgtgtgtttgtatttactgacttgttgcaattttagaaaattgcttgtttttctttcaaaatatttgaaaaaggtattcaattgttattttctaaaatctgtttctgcttgcctttctttcctttttaaagatattttgaacattttaactaactcagtatattttactaaataaaaattgtctttcgagttccagttgtgtatagaaaagaaaatctttagagttatttttatcatcatataaatgttttttgagtcgaataatatcatatcctatagaagatattttttagtttagatcaagagacagacaaatcaaaagcaaaagactttgggagattctttttgctttaaatatttgtcaaacaaaaattttcttcgaaagcatcattccaaacaaatatatttattaggaaaagaaaaaatgtgttggctgattttggaaagtaatattacatccccagaagtcagaagacatgaagtcgaataaagtgaaaaccttctatattgttaatttttcttccctcctcgtttgagcctgtttcctatttttgtatttgtttaatacaatttctatatgttatgccgtttacacatcctttcatttgccctatttctacattgggtcatctgactgatttctttatagctctgctgggattttttttttatttaaaaaaaagccatgtaagtggatagtgggaagcaacgaatatcgaataacatacaagttacaacgggtaggaatagacatggtctcgtacgactttccattcttctttttgtgtggtgcttggctacttggacttttttttggacttaaataaaagaattcatgataaaataatttattttaagttttgaaatggtttagatattatgaagtaaaattactcttaaagcaattactagctagttgattgaaaaattgttaatgaatattaatagaagctaattacaaaatactcaaagttttattttagaagtggagaggagatgtttcaacttgcaacttaatacccgtgaatttgagttgtccgaaggtattaatgctagcccaataaaaaaattcactcttttccgctttaaaattacatccataccatcctccaattgctctcacaaaccttacatagtagtgtgtgtgggagtgtgtggactggacacttgacatttccccgtggcatgcgagaaattaaaaaggttttggaccacatattcactatcaaattttacattacatttaattaatcgagtgttattaattttatataaaaatgatagaaatcatgaataagtaataatagtggatcatctaatgatttcttgcctgcatcacctttcgacgcagtggaactcccaaatgatcattaattcatgcgtcatgtttgaactattgctaagaaacattaatagaagctagtgaaagtatgtatgtattacttcttaatctttgaaaaatatttcaaattgaatgatatcttaattaatattaattcgcttagaatattttttttttgacatatatgtatgaaaaaatcttaaacaacattcattttgagacaaaggaagtatatttcaaaacctttataattgcacaacttggcattggatagaaaatgaattaaaagagaaattaaggaacaatgaaatgaaatactagagtaataatgaggaatgttaattgtggatggcacttccactggctttgtcggaagttccaatgagtccctctctcctcatcttgtcttccttggatttcctacagaagacaacccaagagttgacctccaaagcaatgcaaaggccaatgagagtggagagccctaagcagtaagtcaacttggcataagatctgctggctcccataacttcaaatccctgaaacacattcacaaagccaagcaccacacacgagtaacctacaaaatggtggtatgacttccagtacttcctgaacttgttcctggtctttggcctaaataacaaggccagagtctgcagagcccccagacaaaacaccgcgattccaagcttccggtggagcctatactccactcccggcgacagttgccccagccggattccgatcacaaaccccactgttcccagaacgaaaccaaacagttgtattcctgcatgcataatatttattttccgtccaatttcttattatcatcaaattaagcaattactactataacacaagtcattgtcaaacaagtattaaatgactgcccgaagagtttttttttttttaaatcattaatttaatgatatatggatatgtttagaatatatatatatatatatatatatatatatatatatatatattaattaattatttatatttatgttttttttaatcaaatcatataacataacatattgcatacgctcttctattttctgttttttatatatcacttataatccttatattagaggattaaggtagtctaattctgatacacaaataacactaaaaaatatatattttgtggacactcattgagggtgtttgtaatatgtactcaattgagaaagtaacacaagaaaaagaattgataaacaaatggatttgaagtgtttgtggaatatttcaatcttttataatggaataataatccttcaaataaagattagtgatatgtgaatattttgtcactctacacattttattaacatttatattttttatatcatatcatattatttatatttttctttttttagctttttactgtctagtcaaactaaaaatatgaatggttgaaattaaagagtaatatggagaattgtgttgatgatcacacctgcatgaacatagaaccatgcagggccgagcgcttgaatgtgcctaaggtagcgtgcggtgatggctcccattggtaacaaaatgccccaggagatggcgttaacggtgccatggatcactctcaacgtcgtgagatccgtgtgctgtggagcagacgaacccgacaacacgtcaaaggtagcaatggaagccagatcggtggaagtagttggatgaatggtgggcgagtacccctgaacgtaaagtcccctgttccaaacaaggtgaatcttggtcttgttcgttttcagtttcaccgtgccgaagatttggatggcggcgccgttgtgcacggtggccattttgcctccgtacatggcggcggtggaggagaggaggtggatgtcaagggggcgagagagcagtggagatttttgaagcttcactgtggggtcaagaatataagatagaagcactatttggcctgagtttgggtccgggaaagctattaaggcacgtgttccggtcatttcgggcgatgtgggattaatgccccatccaacccaccctgaaggtgatatgaagcttccaaagaagactagttctaaggttgagttgtgggggtggaatgtccatgctatggaggcttgttgggttgggaggttcatgcatttttcgaacgttttcgtggcggtttccacggtgcaatgggatgacaatgcaatgtggggaagtgaacacacaagggagaggtaaagaagaattagcatggtggtgccgtggatctgtgatggatagactgggagagaattaatggttcatggttcaatgcttgcttttgttaacaacaatgttgtgttcagggtgagtgtcatggatttttttattattaaaaaagtttatgtgagttgcatgggtcccaacttcatcattattaggatagaaattaaaattcaaagaatttttacatttacttacaaattatctacaaataaaattttcgtatcgtcaataaaaatcatactcatgtttttattatttcttactaaccaatttttgctagctgtcattatggattttgagctcgtaataagtgagaatcgttagtgctttctttctttgacgtgcgaaatagtatgtagtttgatgcttgactttgaaggaaagacaaggtggtgttgtgcgtttggtagaaatgggacaatgtgatcgggttttaaaatttgtatctagtggtgggagtagagggcaatatagtatatcaaacgagatattattatgtcgatcgagtgcggctactccttttgattatagtcattgtcttcacgagatacgaaggttgatgtttgcatattgtgcttggctttgaagctatgccataatcattctacttctgaaattttacccatccattttgtttttaagcaaatgaaatgtgtgttttactcgtcctttaattatgtccctaatttgaatcccaaacttcgagagaaaaattgtaaggttaaacacataatttagtttctatatatattacagattttcaatttggtcttctacgtgtaaatgttattgatttggtttatgtcatcgtcgtcataacaccatctttaattgtcttatgttagttaaagataacattgaattgaattattattattataacattgaattgaattattattattatctccttaactcgagaaacacaataaattcattatcccgaaaaaaagtaaaaaatttagaatttaaacttaaagacaattgaatataacttctcatataaaggaatatatacagtttagtgacaacatatgtataagagaacctagattcaatcccctcaaataatacactcttggaaatgaccgatgacttggcacgcaccatttgtgcactcagaaaagctttctctccccctcccaacaagtcttctgctatccgtggatatgccttcttctttgacaaggtaagttgacgtgcatgggttttgccgagtacatgcatgacatgacgtgtcgcgttgttaatttcagcttatgactatagagcaatctagaaagtggtttaaggacgtgcttcctgcattggcagatttgctagctctggaggttgccctatctctttgttggaagcaccctaccaagatgctcttcgcatattggaatcgcaccaaccaggctttgtgtgccttagccaggttacttactttcttattattacattttatctacttttttcctccaagatggtttctaaaccaaaatgaaaattctgaagtcataagtattgcacaactgtgattgcttttcaggagttggttgctactcttcttgtttgctcattattttgtctattcccagacgatcacaaccatgtgaaaggccttcaaatgatcaactttgatcaattgtttgcgtaaggaatcctttgctcattttttgtcgtaaatttgatccttttagtgtcagcatgctgcaacatagagatgaaattgatattggtcattggtgtagtccattttttattctcttgcaatattccaaggtttttcttaattttcaggagtgtgtatatatatatgatcatatgaatgaaaaactgcaagataaggttttgtgcatccttcactattttcaaaggataagttctgatatgcctaagtgcattgtctcctttgagcgaagagtatttcccttcaaaaattactctaatattggtgatcccgacgcggagctttggggcgcgactcgtacacctctatgcaatgttttggtaaatgaaggaaatttattttcaattgtcagcaaaactaatttctttcagttttttttaatgattcatttggtttttaatagttaatactttggcattgtaatagcttctcaattcaggccacttggaaaatcaatcaagtgtagcccttgaattatattttgcaagtaaaaagcttgtgggagatgtccttggcatggggacttcacagttacaatatgttttttgtttccatccattatacctaggtatttatgatagcttttataccatagttcctgatataagcatatgcatgcagtcgtgtacattttgtaattttgtaagttgagatatttgtcacgtgaacattttgttttagcctattgatgttcaataaatttgcttgtaaatgtcagatataggaggaaatccgcttcatgctcagtccagaattgattgctgctgggatgcttttttgcagccgtgacggataatgaggctatagaaattgttggtgtggaaaggttcttgacttatacaagtgtataaatataacagaagataaagttaaacaaataaataattcaaataataagttaatccaaattcgttgtatcttctattcacagtgaagtatatttgattcttcccattgagaatgacatgtggaaaagaaaaaaataacacgatcgacttcacgtagcaaaatgtgacttggagaaattgaaagatgattaaaaatccggactgtaagtattcaacatggaacttcacaattgtccaaagatgtgcatggacgatccttgtgttcaagagttattatctcaccaattacttgttgtttatctgcttgaaaatgatcgtccgctgaaaagttaaggaaggatagagttaactcatgcgaccaattaaaaaattagaaattttataccctagaagtgaagcaacaactttatacctttgtcgctattaaagttgtccaaaaattgcaaaagcttatgtttgtttgtaacaaggatgctgacaatctcaggaggcttattttgatttgcaacaaatagctgtcaattaaaataattaaatttaaactaagaacactgagtttagaagaatctattaaaaaatatatacttgctccatttcaatatacaccttgaaaacgtgtaaggtgtccaattgaattgtcttattttgaatcctgcaaattaaagggggggggggggggggggggggggggggagtgaacaaattaataagtacttttatttcatgaatttacaattctgaaaaatttgagtataggataatgcatatatactcttaagagattcatgaggatcctcatattatcgaacgagctcacatactggaccattacagcagcattcgagcgatccaataccatatcccccaataactgtaacatattaatttgattacaatggtgaaatggataaaaaattgtgactaatgcaagcagttaaaatggacaattgatgctgaaatgaatttgagacttaaggaatctaccacagattaaattatttataccttgatagcgtaccgtctagtaaaataactggtggattcaagcaactgagagttgtactctttgaagaactgacaggcacagtaaaacgttttagctgataatatattaaaatattgataaaaacaaaaaacttaaaaagctatattgtatgaaaacaaccaaattacttatgttagaataaatttgaggattgtgaaagaagctatgacttcttttattcaaataattgactccaatgtgaataagtttttggttcatatctgcctcattgtgcatgttgacctcaattatatataaggtacgaaaccttacattccaccgaggaagccaccaactaaagacaactgatgaaatctttgtaaaccaaattaaattgtctaatttaaacttttacaaaaagataaaacaatgataggggaaaattctttccctcttctacagccttgattgcttttacattctcgaatttacagaggataaatacttgtaccttttgcatgacataattatatactaagtagactttggcgtacttacccagtcataatttttagaaagaaattcagcaactgtagatttgtgccttgtcaataactcctttgtacatcagtcagggaatggattagcttaatttcatgctaatgaatttgctgtaagagcaaaatagtagtacccataactttattatagcaacacattatatgacaaattttagttaattagggagatataaggatgactttttatttttttgaaaagggaagacttagagtgaagggagttggagagaagttataatgactttttatttttttgaaaagggaagacttagagtgaagggagttggagagaagttataagttcaaaattaacaattctaacaaaattaacaaattaatatttattgatataaaaataaaacattttagttaatcgactttttcagttgtgaaatcagttttacatgtcaaagtctatttatacaaaacaattatcataaaacacattcccaaatacaaagagttcttcgcatacatacattcaaatcaatataattaagcctggatagtttaaagatattatttgtttggatgtcgcataaaacaaaggaaaattaaataagaagatgcaagataaaaatatattatggatgatagtttctcttacatttctttttgtatatttctttcatcacatatttcattttctctcggaaaatgcgaaaaaaaaagcagtatcctttatgccttttgctccattgtccaatatatatagaatatagaatatagaatataaataacgtacgtagatatgtatgcaatatactagagatatattttgggactttttcgcaatgcaatgcaagtaaaatgaagaacatgtaaataatgagaattaggcttagatttgtgaatggaaattaaaagacatagcatcataattagcatactttaaaagttgcaacagcatctgacgctctttcaaaatttggtagctgaatataatcagaaaacttcttcatgtgctctgattccaaaatatgcctaaaaaacataaattaagctagtcagaatttgaaaaagaggaaaaagaaagtaaaattccaaagtcagccatgcaagatgcctggctacattttttttaatctccgaaagttaacaattaagaattatgatcctaacacaagcattcatgttggatatataactcaataaattgcatgattatattaattaatttagaggtcgatgattggaatcgcgtaccttgctacgctctggtggcgcatgcactcccttgcaaccgcaccatacgtcaaagcaatgtcaccctctttctcataactaattaaatcaacttttattaaccatttatccagcacagtactgaaactatgaaataaaatttgaaaattcaatgtggaatatcccataaatattcatacccgtctatgagcatctccacaagatctagatttttttccaggtactgagaagcaattagttgcgaattgaattaactcgctgcctttgcaagtttgcaatcacgtgggttgcatcttggcgtgcctaccgacatatatatatgaattaattcttaaatatgctagaaagagaaattaaaaaaacataatgtaactgacggtgaaatataaaaatggctaccccgagtttaagatttgatagatagagaatgaaaatgcgaaatgtgtcatctttgaaaaactctcatgtgatctgagaacacgcatcagcatttggctctgattctccgtttccataaagaaccgttcttatctccagtacgttttgcttaggtctgatagctgcaacgcatgcattttatatatatatatatatatatatatatatatatatatatatgaattaatcaaggttttaaaatatagtaatgcatggcataaaaaaaaatagtaatgcaaccatgattttgattgcaacgtcaacatttaatttaatttttaatgtctacaactacaacgcaatcataattgtaatcacatcaaccatatttatttatttgtgttttttctcgatattaaaaaagtgacgaaactgatgtaattttaaaaagtatcaaatatcagttttttcaaaagttgtacgtgcatgttatgttggtgctgaagcgtgaaaagagtttgagtatctggtgtggtgcttgcgaagtatgatatagcggtggcagtcgtatatattagggtattaattctgagcaaagcttctggtattttttatttttattttcaggctgcataatttgataaataacaggttgtatgtgcctgatgcattttctgttgtgatcatggttataaattgtggtcatggttgcggttagccaaaaaaaattatattgcaagaaaatacaaatgatgcaaccacaattagggtcatgatgagattgcagaaataccttgatgttgcggctgcaattgcgattgcagaccgttgtttaaaacctttatgttgcaagaaaatacgaatgatgcaaccacaattagggtcaatatgcgattgcagaaataccttgacgtcgcagctgcaattgcgattgcggactgctgtttaaaaccttgtgcttgacgggggtatgtccagaatttcttgtgtcctcagtttgataatttggaacacatcctgtgtgtcaaatttttttattgcaataaaattgccttttcaaaagaaaaaaaacaatcttagatttaattatgaatgcacagtcaggtaagacaagttacgtaattttaattatgtgatggaaggaagacattaatttaccttctctttgcgtttactttcacgagtgaatgttttggagtcgagaaagatgatgagttctcgggcgtggcgcacgagctccactggtgtgttttgtgtaaacataaatctataatttctgattaaaacaaacacatcaaatcttatgaacaagatctttaaaattcatgagtttcacataaacataattttgtccatgattactgaagatcttttatggtagaatgttttctcatggtcttaaccctttcaattcttgtaacttcttttgataagggataagatacaactttcatggacagacaaatgaatgtattcagttttctaaatttcaatttatcattttatgcataattgcacctatcaacagttattcttttaataatttctctttgtaaccaattacccttatgtcctttattcattaaatcaaataacatttatttaaatgagtcacaatgataaatcttatattctcccacttggctcatgtcacaactttcatttcatgatttaatgaaaacaattataatgcgcatacataaggctaaagttttcatacactggtctcctcataaatcatgatcagaaataaaactaataaaaatcatgacggttctatgctatcaaatcgacgtaattccttccatgtaccactttattaactcttcttcctaatatgatactttaatgaaagtttacatcataatgtcccacaataatactattatatgtcttcattagggacaaatcttatttttcaaaataatcattcatacatgcatgtatatataaatttgaaaacagaataatatttaaaaacttaaacatcattaaattcagagtgtcaatagtcaataattacaataatgaccaacattcattagctgacataatgcacaaactacatacatgactaataaatgtcttggacgataatcctttcgtcaagggatcaactaacataaaattagtgctaacatgctctatagacactctatgtttatgaacctcttctttaacgacaaagtatttcaatgtcatatgcttaacaccttttgaatacttgtcgtttttagaaaagaagattgttgctgaattatcacaataaattttcagcggtctatcaatactgttgaccaattcaaaccttgaaataaatttttgcagccatttagcctgaacgatggcttcaaagcatgtcacaaattcagcttcaatagtggatgcaacaattactaagtaatttttcttgtatccacacatcatgcaaaatctgagtctgtgtatccaatcacttcaacattactagacctcctataagtaagcatgtgacctttagtgccttacaaatatctcataactttctttgcagctttccaatgatccataccaggattactctggtatcttcccaacattccaactgcaaagctaatatctggtctcgtacaagtttgagcatacattaggctcccaacaagtgatgcatacggaattgcttccattttctttcgttccaattcattcttaggacattgcatgagactaaacttgtctcctttctgaattggtactggagacgatgagcagttctgcatttcgaatctctaaaaatgtattaatatatgctttctgagacaaacccaataatccttgtgatctatcacataatattttttatcccaatcacataggattcctcactcatgtctttcatttcaaagttactaaagagaaacttcttagtttcatttaaaaaactaagatcattagttgcaatcaagatatcatcaacatacataatcagtaatataaacttactcccactgaccttcagatatatacactgatcaatagtgttttctttaaatccaaaggaaacaactgtatcattgaacttaaggtaccattgtcttgaagcttgtttaaatctgtatattgatttcttaagtttgcacaccatgtgctcttttcccttttcacgcatgcacaaacctgatttcatttaaaccttgatagataaagataagtgattgattgttgataattcttcttcatcttcaacaagtttcattatcattcgataataaagtaacctcattttgaagttggcgtaacatttctcaaatataatttgacctgaacaatttgttttgaaatatattatacactttcaagcatatttataaatattctctttatttttttttttgtacataaatatatactcttattctaatataaataatagtgttatatagaatacactatatgcgaagacaggaaagcctcgtagcttctagctagcaattgtgaccggcataagaacttttctttagtaaatagaaagtcagtcttatatatatatgctcttgcacaaggatttcgtattgaatgaatacccttagacattgacaacataagtatatacaaatgcttattcactatagacttcaaatagtcctcatcgtcaccttacgacgatgcttatgaatctacaaaagaaaaatctgatcaaggagaatgtgtcaacccaagtctcttaagctgtgcaagcaggagcttttccagtaactttgggcttgacattagcacatttagcaactactggagctccattgaatgtaagagcaacattatttagttccacaccctcacatggtacacctttgctacatataagagtcactccttccttggtttttgaagtgcccttaatattcttgaaggtaaccttgcttatctttatttttgatggagtctaatccattgaaagcatgcacaaaatagacaaaaacaaggtataagaaacctcacgatagtgcatactcaatcaagattaaaatactagtgatttaaataataacaactccagtatgattataaagagggtaacaaataaagacatttaaatttaagaatcgtgtctgattaaacatataagtacctgttttgagcactgattccaaggacaatactcttggtctatgatcactgggttcatgacatcaaccatggtaatatcttcaaaatgcatatcagtaataggagaagctcctggagaactaggccaagtcttgatcctcacaccattgtctgtttttgtcaaagtgcaattcttgactagaagttgttctaccggctcttcttttgggtacttgccaagacttccaacactaatgccatgaccaggtccacaattcacattctggacagttacttttctactgccatctcccaatgagacacagtcatctccggtggcaatgttggagttaagaattttcacatcagttgatcttccaatgtgaatcccgtcagtgttgatactggtacttggagcactgacgtggaagccatcaaatgtgaagttattgcatcctaaaacgttgacatggaagtttttgctatccttagaagttatgtcccgaaccatagaattattcaggaaattgaaaccaaaattctgtttacaagaaactcagctcattagaacgttttggtagaagtgcctgtgctagcaatttgagattaattgaaatggctatatagttatatagtttatttattaccttggaacgtgtcttgcaattcttgttagttccacaatcattttgtttccaagcagttgcaccttgaccatcaaaaacacctttacctgataaggtaaaaaagttaacatattgtactttgagccattcatcagccccgttgagtgcattcgggtcagccggtgcttgaagtgtgccatcaatttgaatttcaatgggagccatgcaaggaccttttaattcaactgcttccatcttgtatgacccacctggaatcacaattttgcttgcacttgttgctgcacatgcctctttccaagcttttgtcaaagccttgaggacaacatatatataaattacaaatcaaaacacaatagcaataataataatcagtggaatattcaatcctttttttagggaactcaactgctttttacctgtgttatatctgcacctccgccaaatttttttatattaatgtcaaccgattgagttgtactagaaatagctagcaataagaataaaacactgatagctggaatattcaacttcatatccatgttgttattgataaactttattttcttgtactctttagcgatgaatgttgttttcaaaatatgatggaactctatttatacttgagtctggaatcttcaaaaccattaacaatgtgaacagacttgtactatatcaaagtaattaattatgttcgtgcaattgtctggtttgagttagttactattaatggaaattcattagctaacactaacatataattactatatcaatgtaattaattatgtccgtgcagttgtctggtttgagcttgttactatttatggcaattcattagctaacactaacatatcattaataaagttctatatcaatgtaattaattatgtccgtgcagttgtctggtttgagcttgttactattaattaatggtaattcattagttaacactaacttataactgataaacttctaactgtaaaattccaatacttaaaaatcctttttcatcattgttataattggtcaaggttatcaaacttttttttaaggaaattaaagatgaaactcaatataagacatgtttaatttgaatataatcattaaacatataagtctaattttgtagcatataatcctaataatattggaagtgatgttatatttatataatttctcactcatatcataaatataatgtaaagaaaaaaaaatacaatcaaacttttattattatttattcttcaatgttaatatcattatatgctattttatttatcaacaattaataaacattttgtagcatatcttgataacaatattgcgagtgatttcacactcatatcacaaatacgaattaatgaagaagaaaaacatgataaaacatttattattattattattattattattattattattattattattattattaatattattaataatgaagtaaactagcaagctatatgcatttaagagttgaatgtttttttttttttgtctgttattcctctggtgctctacccctcccacttagagggcaatgtaagaagttttaccctcttgatgtttaatagttagtcaagagggctgatataacgccgagttctttgtaaaagagttaaatatgttctacatcattttcttctttatgatatgttatactatgttcaatttttttctaacaatgaatctcaatttctttagtcttggtaagttatggaagttctttatgatgtgaatttatctttgatcttttttcttttagcaaaacttgactacaattcacctatactctttctgttgtatgttcctttgtagtgctccattttttcacatcaacatataagttggatggaaataaatattgatgctttatacttgtgaagtgtccttttagtttttcattttcagttgtcttgtatgccaacactgataaacttgtatatttacttcaggaatcgctacataggaagatcgttttgatgacacgaacttgtaggtgaagataatccagtgaagcaggtgaattgtgaattttgcacaccactgttgttaccgaatttcgatttaagacgcaagatgtttgattttctagagctaactggagtacctgttttgagggttcagatatagagataggttacaagggaatgttaaggcttgagtttttgagttgctgtttaggttatgggatttgagtgagatgtaaaatctgattgcgggatatagcggaagtgtatcatgcatcacttgtgaggcagcaatataaaaaagatggacaaacaacatttcttttttcctttttcttttcggtagattttttgccttttatgtcttgcaaagttttggttcttctcaataattgtttgtttcttcatccgtcattttggtttgcttttagcatattgtatatgaggtttttgcattctttgttactagtgtgaaacattaaagggttacccatctagggtcccgtgaataagttaccgtatgttctgattctttttctaaaggggaatattttatgctacaaaatcaaaactatatgtgataaatggatttatttttccccatttgagtatttttacaaattttgtgaactatctagtattttattacacttgtttaccccattgccattcttaacacaaccaaatcgtttaacatagatttgtagaactttgtaagcatcactaataaaacaatgcacccgataaaaaatatcaaaaaaattaaatatagattaattcttttagagatacgagactatatttttttttcagtgggtgtttgatggctgaggtctactttaggatttttcacacaaacatataacaaaaatttaatatatacataaacatacatgtataatttttatttacagaaatatacatatttattgttcacagtatatcacccctgcacaaacatgatttcatttaaaccttaatagataaggataagtgattgattgttgataattcttcttcatcttcaacaagtttcattatcattcgataataaagtaacctcattttgaagttggcatacatttctcaaatataatttcacctgaacaatttgttttgaaatatattatacactttcaagcatatttataaatattctcttttttttttgtacataaatatatactcttattctaatataaataatagtgttatatagaatacactatatgcgaagacaggagagccccgtagcttctagctagcaattgtgaccggcatgagaacttttctttagtaaatagaaagtcagtcttatatatatatgctcttgcacaaggatttcgtattgaatgaatacccttagacattgacaacataagtatatacaaatgcttattcactatagacttcaaatagtcctcatcgtcaccttacgacgatgcttatgaatctacaaaagaaaaatctgatcaaggagaatgtgtcaacccaagtctcttaagctgtgcaagcaggagcttttccagtaactttgggcttgacattagcacatttagcaactactggagctccattgaatgtaagagcaacattatttagttccacaccctcacatggtacacctttgctacatataagagtcactccttccttggtttttgaagtgcccttaatattcttgaaggtaaccttgcttatctttatttttgatggagtctaagccattgcaagcatgcacaaaatagacaaaaacaaggtataagaaacctcacggtagtgcatattcaatcaagactaaaatactagtgatttaaataataacaactccagtatgattataaagagggtaacaaataaagacatttaaatttaagaatcgtgtctgattaaacatataagtacctgttttgagcactgattccaaggacaatactcttggtctatgatcactgggttcatgacatcaaccatggtaatatcttcaaaatgcatatcagtaataggagaagctcctggagaactaggccaagtcttgatcctcacaccattgtctgtttttgtcaaagtgcaattcttgactagaagttgttctaccggctcttcttttgggtacttgccaagacttccaacactaatgccatgaccaggtccacaattcacattctggacagttacttttctactgccatctcccaatgagacacagtcatctccggtggcaatgttggtgttaagaattttcacatcagttgatcttccaatgtgaatcccgtcagtgttgatactggtacttggagcactgacgtggaagccatcaaatgtgaagttattgcatcctaaaacgttgacatggaagtttttgctatccttagaagttatgtcccgaaccatagaattattcaggaaattgaaaccaaaattctgtttacaagaaactcagctcattagaacgttttggtagaagtgcctgtgctagcaatttgagattaattgaaatggctatatagttatatagtttatttattaccttggaacgtgtcttgcaattcttgttagttccacaatcattttgtttccaagcagttgcaccttgaccatcaaaaacacctttacctgataaggtaaaaaagttaacatattgtactttgagccattcatcagccccttgtagtgcattcgggtcagccggtgcttgaagtgtgccatcaatttgaatttcaatgggagccatgcaaggaccttttaattcaactgcttccatcttgtatgacccacctggaatcacaatcttgcttgcacttgttgctgcacatgcctctttccaagcttttgtcaaagccttgaggacaacatatatataaattacaaatcaaacacaataccaataataataattagtggaatattcaatcatttttttagggaattcaactgctttttacctgtgttatatctgcacctccgccaaatttttttatattaatgtcaaccgattgagttgtactagaaatagctagcaataagaataaaacattgatggctgaaatattcaacttcatatccatgttgttattgataaactgtattttcttgtactctttagcgatgaatgttgttttcaaaatatgatggaactctatttatacttgagtttggaagcttcaaaaccattaacaatgtgaacaaacttgtactatatcaaagtaattaattatgtccgtgcaattgtctggtttgagttagttactattaatggaaattcattagctaacactaacatatcattactatatcaatgtaattaattatgttcgtacagttgtctggtttgagcttgttactatttatggcaattcattagctaacactaacatatcattaataaagttctatatcaatgtaattaattatgtccgtacagttgtctggtttgagcttgttactatttatggcaattcattaacttacactaacatatcattaataaagttctatatcaatgtaattaattatgtttgtgccgttgtctggtttgagcttgttactattaattaatgataattcattagttaacactaactaatgattaataaagttgtatatcaatgtaaatttgtccgggcaattgtttggtttgagcttgttactattaattaatggtaattcattagttaacactaacttataaccgataaacttctaattgtaaaatttcaatacttaaaaattctttttcatcaatgttaaaagtgagtttgtttaaatttattttaaaaatattttttaataaaataagtattttttttctctcatatgtttatctaaattgtttttacttaaaatattttttttttattttgtttaggaatcaaatcttatcttcttaaaaaagcatttaaaaaaaaaaaacacacttgttgtaaacactactacaaaaaaagccttcaacattggttttggaagacttttaacaacgatgttgaatcgaccgtcattgaaagtgaacaactttcgacaacggttcaaatacaaatgttgacaacacttttttacatcggttgttcacaatcgatgttgtaaaacactttttacataagttgcaaccacaaccgatgttgaaattaagtacattttttaagagtaaattacactcacatcccttgtgtttattttcaagttgcaccccatgtttttttctcttggtgttattatgtctttaggagaatgagcaattccttctaatgtaatgacttccaaaaactagcacgaagaagatagaaatgagtaaatttcgaattgcaaaactattagttctattgcataattagtgacaatttattacctcttcatgctcaattatgtgtgctaggggcaatataacttgaccttcatccctcatcagtaaacccattgagtgcctcgttgaaacccctggcattacataaaatagatgagttgaaaatgccttataaagcagctcaatggttccaccatttgttgtgggtagcacattgaaaacatcaacagcttgacagtcgtgaaaccacaaaggccggtatttaaggatttctacaacctgggcagagtatgtttgaccatgtgactaataaactcaagcctgacaacagaattaaaactattgcaagaatcaaaattttgttggaactcaaaaagtaaagtaatcgtaaaaacggtgactttagttgaagggtaggtgatggaaatgaaggtttttttttgtgatgagaaagaggaagcaaacctatgaacaaaaaattatttactcaatatcttaattagacataacggatgctggtgttgcatttggatcaacttggcatgcatgagaacttaattagatagatgattgatttcagcttagattggtgagaaaaagcaaaaaataatttggtcagcagtattccgatagtgtttttgcattaaatgttagtaactattatacctgcttccaaaattaacataaaggctgcaaattgttctgtcttttttcatttgagaaattattttggatatagataattgatttcagctttgattggtgagaaaaggctaaaaaaaatttgtctggcctatactgatagtgtttttgcattaaatgttggtaactattatacctgcttccaatattaacataaaggctgcaaattattctgtcttcctcatctgagaaattattctggatatagataattgatttcatcttagattggtgagaaaatgctaaaactaatttgtatagataattaggtggaatagtttaactgtatagataattaagaggagagggatgccgaacgaaaaaggcaagaaaccagtaaagagcaagagagggtgcaagatctcttggatacactttgttagctatttcagtttcagtatatcagtatcagcagaagaagaatacagagtgttgactaaaatcattttttaagcatcagtgccaataagtctgaacctattccctgatgcaaactacccaaattctcaccactagcaaacacaagcaaaatgtgttaagataccttcaaaaagacattaggatctcaagcaacaaatattctcaattcatgatccaacttactagcaaaagttcatggagaattcaacaaaaataaagagaagcaaacaatgaaataaaacacacacatacaacaaccactaaccactaaccactaagttgggtcaattcttgagtattcttcaactctataccaacaaactaaacttgtaaactaccataacataaatgatactgaccactgtaaagacccattaacttgacaataccgataccattcttagtgctttctgcttccacatgagctcgttgtgcctcttcaacaacaatgtcaaaaccgaatgacttatcagaatcaggtaaaacatgattaaattaggtgattgtttaaaagcaaatcatttttacagtctcagcaaagtagcttcaattgtccaattcaagcatgcttactgggacatcactatcactatcaacgaattttgttccaagaaatcagacaaagcccctcagacatgggtccactctcatatttaaaaagttaaagcatctaaaaccgcaccagccaccaacaaatttcttcatcaattaacctttttccttcttgaaggaaagaaggcaaaccagaattgaagcaaatgcaaatagaatcaaacaacttgtctcccaattaaaaaataatagatgattaaaacaaccacattgaacaattcaccctagtgtatcactaccatacaaaacataaatagaaagggatagaagtcacaaaactgttacaattatatagtcttatagattttaatcctcacattagtatattaaagaaataccaaaagtaagtaaatatatatatatatatatatatatatatatatatatatattaagggatatcttcatcatcaaagatcactaccaaaccagtcacgaccttaacgccagacagcgaacccttgagctttagctccgatggcttccactctatcaccgctaaatatatatttccatgaagcctcaacgagtactattcaataattgaatataaaaacacaagaaacgaaggaaagaaggagtaagaataatacaatcacggattcttccttagagaattacgacaatggcgattgatggctgacgaagggtacaaacaacaaagagagttcacgccgtagacgtagatgccatcgcagcagcagcgtcgaaacgatgtagacgccatcgcagcggacttcagagatgagggaacggcgagcagtgtcgcaagtgagtgtcaagggtttgggaagggttgttttgggattttggaagtggactgagagtggtgagagtgagcgcgaaaataagagagtgaaacagattttgaattttttaatttggaaaaaaatacaatgccactttctataaaaatcaatgaaaataagcatcaaacaacattaaattttataataactgatattcacatcaattttttaaaaattgatgttaataaaatttattaacaaatatattatcacacttttttaacattaattttaataaaatcaatattaaaatgactacattaaaaatatattttctaatagtaaaaattatttcttttaagtttatacaaattcattcaaagcattatctcttatcactttgattctttggtgagatacctttgaaacattttatcttaatgcaaataaggatacttggtcttagtgaaaaatataattacttctccaaaaaaaagtgaaaaattaaattatgcctttaacattgtgtgtaagccaattttcctctaatttaaggaccaaataaaatgctaattatgaaattaagtttaattatcaattttaaaaaaataaattaactatattttagttgaaacaattgttcaaatttaatttctaaaatagctcgaacaatattttttttaagagtattgctattaagtacgaaaaaacagatgcacaaaacatacgaatcatcagatataagttgttagatctttttaaataattataaattaaaaactaaaaaaaaaagataaagttgtttgttttaactggaaacaactattcgtgtgattagtacgaaatcagtttccatttttctaaaaagcagcaagaatatattatttaattaagggattcatatattttgaataaatcattaaatttacctaataatccttttttatgtgtttggttgaagttatttcgaacaaataattatttttttatgttataagcatggtagtactattatttgagactatattcttcttttaaatatttaaaaatcgaattcacgattattcattaaccgtgaacaattacatgtcaattgatatacataaaaaaatttaaaaaaaaattacatctaattctctactattatttaacctaaaaaactctctaattattttcttactatttcttagaaattattcttttaaaattgaaaaattcaaatgtgtgttaataataataataaaaaaaaaatcatgatttttatttcactaagttgaatttcagtggcgatatcgtgatagtacaagtaataagttactagtatttaattaattttattaatatattagttaatacattattatacattatttaaagtaaaaaaaaaagctaataggtgcgaattattggataaattttaattaaccttatcaatatattatttaattaattattgagaaatatagggacaaaaaagttacgtaaaatatttgtataagaattaaaagaaaaaaattaaaaaggacagggaaaaagaaagaagatattagaaggacagcgtcttaaacatttatttgagaaagtggattgtgagggcagagcgagagcgagagggagagagccttggatcgtattcagctcaattcaggtatctatgtttccccctttcaccttctctctctgcctccttccatttcttatattcgtcattcttctttccttaacccgttaaatcaagcaatttgcctttcaactgtttgatcaaagttgccaatgaaacaaatcgttttttttttcatatttgcccaataattctaacttaactcatctttcgctttttgggttttttaatatacaattacatactcggtcattttgtatttttacattatgttgaatgttgaaatttatatttagttgatgttttgaaatttgcatttactaaacatgaaatgaacttacattttgtagatacattgaaatgcttggctgagagttgataatttcttgaagatagtcgttcatttcttgagttttatgtgtatgccaaaaatgacacacacaaaaagtttttttttttttttttataattatattgtaaaacagatatggttatcccacccccagtgaggcctcccaggattacacaatttctcaaaccttatgttctgaagatgcattttaccaataagtatgtgagtgcccaggtgattcacagcccaactgctactgtagcctcttctgcaagctcgcaggagaaagcgttgagatcaagcttggaaactagtcgcgatgtggctgcagctgcaaagattgggaagatactagcagaacgccttttgcttaagaacattcccgctgtttctgttcacttgaagagagagcagaagtatcatggtaaggttaaagcggttattgattctctcagggaagctggtgttaagctgctttgattatgattgtttaattgtaccttagagagaacatccttgttggatcttgtctaaatttatttttgagttttcgtcattacagcaagtcactcattgaacatatttctcaaataccttagttaattacgttactagaaataagttgagtgttgatggttgcttagagtgtggagtggagtgtgtttgttttactcatttcccattttccaatgcacttccaacagtttgcagttgaaaacttgcaaacccatgttcaacgtagatatggttgcttcctatttttgtgcattggaaagtgtgaatctactgtttgcatgatgtttgtgttcaactaaactaagggttttcaagcacacccttaatatattttgtctaagaccgtaaaattgcttgaaggaatagtttacataagatatcaactgtgatcagctcaccaaaatggtagatagactaacaggacagtgctctcttgcttggatcttaacaccgagatgttctgctgaaagatgatgtagaacgatgatgcagtgctcttctgctacttgatctactcaaacgcaaaggaaagtttattagaacacaatacagggacatttggaatgtaaaatgaaaagaaaaacaaaacaaaacagatagctacatgaaacagcaaggtgacagcactttggaattggttggtacttggaagcgtcccgtattattcttttcgggatgacttaacaataatgcttgcacaagtgcagtctaattcttagttttaaacaccagaggccgataagaaaaatatactcacaaagcgagaaaaagaaagggaataaccacgcaaggacccttcctttgatcaattctgccactttctacaaatccattgtgaattgaatcttgtaaaaaatgtgtttgattatcagtataggaatcataatgctaatcatagaaatggattggataaatcccgatcctcatagtaatgaactaataataagctattttggctgtatttaagatttgagacatgataactgctgaatgcctgaaccttaactgctaacattagtatagacatggctccttttcaactgcttattaaatgagcccatatacattacatttgctttatgtttagatttagcacaatagaatatttaatgccatgtccggagtattttccaatttccacactaagagagtaaaatagtaatacatgactgctctagaaagttttccttgcagcatgatcgggaccaactaattaaaatgactgtatacatgctttggtaaagccactgtagaacctcagtcaaagatgaacaaagaagaatgaagaagctatagaaaaaatgtccaatcatacagcagaagaagatgacatccaaagtatttctcacactcaaagttactatattgtccagaggaatcgatatcatatttcatagccaaccaccccttccccctattttcaagactacccttttattcaaaacagtaaattaataacaatttatttgtaaaaacattttaatgcagcggcaaattgttgtagcaactgaaattaattttctgttaaaagaataaattacaatcagataaattcaatttgaaatacctaatataattttgttataccatgatactcatatgaagtaactcgatcgaaaataatgattaatcttcgtcgaagatcgtaagcacacttagggtataattccttatataatataattaaataatctaataattttataattatataatatcaagtgcacgggttgattattgtattatttgataaagttacaaactgcatcatgaaattttaagttaataagattttattaggaaattaattgctactttgatttattttttaaaataattcaaattcattcatccgaaaataaaatgaaaattataaaatattggagttaaatttatttgtaaatacacaaaatcatgagtaaacttaatagcttagtattaaacacgagatgagaactaccctattatgcaacttctaataaatttcagcctatattaatcccacggtttgtcgcaaaatggttcctcccacttgctcaagtgataattaagaatagtagaatagtaaagataatttgcaaatatacccgctatatgatacatattttttattttttttatggaaggcactatatgatacatattggacatatcgatatgatatgcagatatgaaacgcatatcaaatacaatacatattaattattatttttatactgcaatacatattaattagagatgatacacaaatatcatacacatatcagatatagtatatattcactaccaaaaaaaaaggacatagatatagtatatttttgataaagcaaattgactattctcaaaatatataaaatacgttatgcgtaaatatgtgcagaaattcattaatcataataaatatataattacaacaaatccaaattaaaagtatactttctaaaaattaccataaataaaaaatataaatcattatcattaatacagtatcaatcttattcccgttttaagcatcatgaaagataactttatttttggtttattaaaaaatgaataatttaagatttattgaaagataagtttagtcatttttatgggttttattgtaaaatatatttttaaatgagttatcatatgaatgttatattagactttaaaaatatgtttatatcatataaacaagtataacttcattcttacaaagtctcaagttcctattttcacctctatcacaaggttaaattattataaaataaacttttaaacatacttataagaaagaaagagcgacccaaaaataaaataactaaaactctttctttaggcttcattcattgtttgatcaaccacgcttataaatcatgtcaaacttttatgtatgttaagacatgccttttaaaaagtcatttgagacgtaaacatgctaagcttagatctaacaaagcgtaacttgacctagtctattttcgttcctacttgcttctagtctcttgtctatagtattattaggttcatagttatttcgaaaggttcggatatttatagttatgtgaaatattcaagagtatattttcgtatatatgtattaaggattttgtgcttctaaaataatgaagagatatagagcataaatacactcaatttttttattagaaatcattgatttaaaactgtgataaaataaaataaatatacagtaaagtttacagttttttttatcaaaaaatgttagatgttagtattcgtaattttcgttatcatctcaaccatttatttcttaattagtggtttgggttttgtccccaaaaagatgtccaaactaaaaagtaaaaactataaagtgtttgaatcacataaaacaatttatgttcaacccattcaaatctgttatttcaaataaggttattaggatgcaaaaaaaaaaaaaaaaaaaaagaagcatttttgcagtgaatcccaaaattttgatttatgcaacacaacttcagcagcacaactcaattatatcaagacccagattgcgatctattcttgtagttcccgtatcttctagagatgccagaatcagataaggtgtcccatacctacaaattataacaagttacaacagtcaagtcaatttcacaccaagaatcagagaacgatcaagaacacgaaagtattgttcatctgaacttttcacttacttgcaatttaccctttgagcctcctatagccaacaagaaggggttgtcctcagagaaagaaattttaaagatagccccctaacaaacaaacaccataaaatagataccagtcatcagtgccaatttaacaaatatattatgattcgttgaagctttcccatttaaaaaataaaaaaagaaggaaacgtactgctctcggagatttagatgctacacaagagggtcggttgttcaacaaatcccaaagttttacctgtgagaaataatagcagccaaatgagatgaattccaatctgtaaagtacagtataccgaaaaataacaaaattgacttcactattaccgttttgtccatggatccagtggcaagaagctgcatgaagtcatgtcaacagggcacagcaggttaaactaaaatacataatcagttgatattctaaccaaactgttgaagatacatacattgggtgccgatggattataggatactgaggtaacagctttgtcatgtgcatgaagtgtaaaggtagaactcggatctgatgaggaatcagagttggcagtccgtatatcaaaacccttgacaataccatcttcaagactcacctaacagaacaattaaatcactattagtgaaccaatacctgtgcatccacgaaatcaaaattgaaatttgatcttacagaataagaattggttattattttgtcataaaaaagttagtagctgaaagaatgttggttattattttatcataaaaaagtgctagtatgttttatcaaaaaaatgtaaagaaaagaaaagaaatgttagtactcaggtcctagaaataactataacacaccacaaaagaatgctctgtgtgcggatcccatgccaagctctctacatcagctgtgactgaccacttgtagccagaatgtgatggcatccttccatccttctgcaaagtgtaaaagctataaatattagataactatatgaatttttaaacaaaaaagaaacaatttttttaattggaatgcctcttttagcacatcaatatacaaccaaagtgtacagattacagaataataagtaatcaatgacagcaaaatacagaaaagccgagtaacaaaggaatattggatcagatcattaccaagacgacagtatgatcaaatgaaccactaagaagagcctgtggtgcatgaagattccaagcaactgcttgaacctgtgagaatagatggacaagagataaatctgaaagacatcaggaaatgtattgactcaaatattttaaagtagaaacagaatttaaaaaaaaaaaaaaaaaaaaaaaaaaaaccattgcgtcaaatgattcaaccaaggaaggagaaattttttccattgtaaatttgtttctcacatacatatagattgaatatagattgaagaaagcatttaattcaaagctgaagattaaatgatttattatataaccgttccatcttggttcataatagtgcagcaaaaatcacctcaatctattgatgtttaaatcatatctccaaagttctaaattatataataattctaaggaagtgtgtcaacatgaagagaaaaaagtcggtttcatcaataaaatgaattaactcatgataaaaaaaataaaatgctctagctaatttcttgccttgtccgagtgatgctccattgtaatatcacacttcccagcaactacatcccaaatctttacttgcttatcagcactggcacttgctagtatgttccttttttttaagaaaatagaagtcaagataaacttttaggttccagaaagcacatccaacagagaaaataaaagcagaatccagttttaattcaacaaacctgtactccttgttccaagcaagaccaagtactgagtcagtgtgactgtcatctttgtatttgattgatttctgcaagaaaataattttaataagaaatggccaaacatatttacttcaaaaatctataagtattaaaaaaaaataaagatgaaagtctaataaaatagtacaagcaaaaatatggattttcacactagtagcttcaatgctcatatgcataagacatctgcaatttcagtttcatctaaagctattcacaatcccaaataaaaaagttacaaaattcagaaaacaccaaaagatatactcaattatgttagataaaccattagttagttgagttttgttagctaagccatcagttagtttaattggttagtagttatttattagttagttgcaatcagtgaagggtatcacttagaacagatgagaggaaagggtgccatttgtgagaggaaactagggccttttggcattgggtggtgtggactgataagaacagagaaaatggagtagaataaaaaagatgaaatagaaattttatagaagtaaattgagatagtttctaataacacaggttttcgagagcctgcctctccataattcagacttatccttctttgttttttcctccccttcctaatctggtttacttctatttatactgcatctaacatctattcctaatagacacaattgttcagaatggttgtgactgttctcatttgtaagtgctccagatctgatgttgttttggctccaagggttgcgccctttctccaccggttgcacccttctgagtcgcacttcctggtcccaaaaaatggtgtgtctcttcaccaagggtcatgtccccttgattcacatctcttgactttgcgccccttgggtggatggtgtcttttgggttgatcaccaagggtcatgtccccttgattcgcatctcttgaccttgccccttggatggatcatgtctgttaggtggttagcactccttgggtggtcaagaactgttgcttctcttactcgctgcttgcgagtgtacaccctagtgatgggtggcttatgcttatcacggacccccgaagttctgcaatgcagtaactaaccaggggagattttcattattatcttttgtagtaagagatcaactaacccatatattagtagttagttagctacgatcattgaagtgaattcacatgtacaactgaagagagcaaaggaaagcatcctaccattgtgagaggaaattagggcctgttggcattgggaggtgcacaccatcaacttctgcagtgctgtaaccaggggagattttccctattttttttctaataagatactaggtttctatcattttattgagttagaatgctaacaatggacaaaaatgtacatggatttacatgaatgattaagtttcataagtaaaaagctaagctaagggtatcgatttaagtgcacatgcatatatatacttgcacatgtacaataatactagaattatcaacaataatttgcaacttaactgcatttaaattttcaaagagcacaaacaaaccttacaaacagcacaacatatgcaatttccacaaataaatcataattaagtatgctgccattttgaggtaatcacatgattctaaggggattgaaattaacaaaaatgtagaacaaacctttttcccctttttctttttctcttcaaatccacccaaaaccacacatggctgcacctcatcaatctgagagcaaaggaaaattacaaggtattcagaaaaaaagatctctctttttgtatatgaaatttcagacagcacagttaaaatttatatactcaaaccacttacaacatcaaggtcccaaatttctatggaaggttccattgaaccaacagctatgaagttccctgtgatcataataaaattattttaagctaataagataaagcaaagatatatcaagtaggtatcaagtaaaattttaaacacaaattgcaatgatggtgatttcaggtagtccaaacctagacagttactcaaactttgaagaattttttttaatggtgtacacaacagaagtgaacagcatatactaatctcactttattttctaatgaaatgcaactttccattacaatttttccacttcacctctggatgatatatgaattttcatatttttcatttttggcaaactaaaatgaaggcagaaataatcagaggatataattaagacagtttacaagttttccttgagacttgttattttttcacttttctaggagcgcccttcaattcaattaaatggtgagtgctggggagggagaaaagttgaattgcacaaaacaaacaatcgagcaactcgatcaacacaaatacacacgcaagaggtatcgtgcaaagaacctctttctcctcctttaagggggcaatcgagccaagctgtgcagagtggaaatgctggaataatgatattatggtgaggatacacgttcatttcactagaatcggcatcctcgataacccaaacctggcattgcagaaagaaaggagtgataagtatatatctgtataatatacgaggacttgacaagtcacaaaacaactaactcactaacctcaagataactgacttcatcctcggtacatgcataaacaacgacagaatcagttgggttaatgatcatgtcttcgagttcttcagaatcatcatcctgaagcatcataaacaacgtaagataataagaagacacgcgccgcaaccgcaacgctaataaaatgacaacaagagctggaacttacgcttttatctttgagatagggatccatgtcgttactgggataataaagatcaccaattccagaactgaagacctcaattcctaaacaaatgacaaacttaagtttaagcagctgctgcattgcataaatataattacaagcaatgaatgatcatatagaatgcagacttacgtaccttcatcttcgtcatcataacggtccatatcaaggtccttcaacgcaagggttatttcgtcacaggttccagtggtggccttgccgactgcatctgctacggttaatgcttgtgccacaacttcatcgttgttagcgtcttcattgtcactatctccactgcacataaaaaaaaattggatgttagggttttactggtgaatgataatttttgttggaaccaaacaaaaggaccaccttttggttgagtggttggcgattatctcttgaatttcttcttcgggaggaggttcagccacgacaagttccgacttcgaaacccctttgggcacccacgaaatcgcagaaatcatttttattttgtttgttttgttagagagacgacgcaactcaaccaaaagaggcagcagcagcaagcaacaagcagagaagagggttttaaggaaaaaagaaaaatatgaagaagaagaaccaccctccctttagcgggggaattcatgggccttggcccaatacagcccaaatgtctttatgtcaggggtaattctatttgtaaggacacatgaacaattatatctaaagatcaaatgtagtacttagtatgtactatttaaatattcagagcttgttttgaaatatctacatgttgtaaagatgtgtttgacgaagacattaatcgtgtgtttggattgtcgtttgaagaacctcaaacagatacctctacttttcgggacagtgaacatagaagcaatccctatcattaagacaggcacaagattattgaagaattcatttgttttgggatgatatattattgattatatcaattcttaaccattaactttcagaaatatttcaaaaatagagtttataccttttataaataaataaaaaagatatattcttacttcttagtaatatatattttaagaaaaaaaagaagccaacggggagtagaaataacaatatggaaagtgtaaatactaaatacccattgtagatttgcccatctttgttgtagtattaaaactcggcccaacttcagttgtccttcccaaatcccgctaaaccactccgtctctcacagtctcactctcaccgtcctcgctcgctccagcgtcgttgcttgctgctccaccttaatgtgagttcatcttaagtattccaacttcagcctacttcatttcttttgttcttcttttttacgcactaagacgctacttaactctatgtatttggtttttcttttcgttttatttctacgcttctacatgctatgccgcactttcagtaagcttgatctgtataactgcttaatcaaatcatctttagttttcatattctcaaactcatatttattcattataaataaatacctctgttgtgtagtctagctatattgcatattttcttttcttttatcttctatcgttttattttaagttaacctaagaggtaaattgaaacctgtatattcctatcatttgcttgtttcgtggtgtttccatgcgataagatgcaacatccagttccccttgctggcatatgcgcttattttttatttttattttactgttttagagactacatcaaggaattgcggtcaaatttcaatgtgcagaacgcaacgcttcactttgacctagctttgtgatggaatgtgacgttggaggtgtctctgattcatgcattttgcacacttgcaagagaagaagggtttataaaggctgttttcatccatccattgatatcatgacagaaactgaagcttccctacctatcttcaactcgtccggttattacaccaaaccatctttgaaggaattagtggccagggagcttgttgaacctggttattgcagccgtgttcctgatttcactgttggaagatttggttatggatatgtcaggtatctcaatgaaactgatgtcagggggttacgtatagatgaaattgtgaagtttcataggcatgagatagttgtatacagtgatgaaaatgataagcctgctgttggccagggccttaacaaggcagctgaagtagttttggtattagacagtgaaatattgaagtctaaggaggggaaggaagatgttatagttagcaaattaaaacaaattacaaagaggcaggaagcacgatttatttcctttgatctagtgactggtgagtggaaattcttagttggacacttcagcaggtttgggtttggtgatgatgatgaggaagactttgttatggatgatgctgaggtatatgatgttgagaaagaatcaccatcaaataccaatgaacttgaactttctcattctcttccttctcatcttaggcttgatcctgttaaaatgagagaaatgagattattgatgtttcctgatgaagaagagatagaggacttaagctgcaaatcatcttctggtaagcagtatgtgcggcctttacaaagttcaactcaggcaatcaaccatcgatccaccccaccagttgctagaaaaactccatttccattacttgagtataaacatgggaattttgattcaaattctcctggaggcattttgatggttcagcagcataagggcatgcctcttaggacgataaaatcacaaggttttaagctagatctcaaacatgaaactccagtatctggaaactatgcccacaatatagttgatgctggtctgtttatgggtaagtcatttcgagttgggtggggaccaaatggcattcttgtacactccggtgcacccgtaggaagcagtggtaatcacaaactgttatcatctgttgtcaatttggagaaagtttctttcgacaatgtggttagggatgaaaataaaaaagtgaccgaggaacttattgatcatgctttggtatctccattaaattttcacaaaggaataaaccatgtgatgaaagaagttgaaattggtccctgcaagttgacacttcaaaagcttgaagctaatcgttcgactctatctgagatttctcatcactattgtgatcttattgagcggcaattgagtgttcctgggttatcttccactactcgtttgggtttgacacaccaagtaatgacctgggagttaattagagttcttttttctgacagagagcaaaaaggtcaagtagaatctttgggtgctgacaatgaggaagatatgatgcaggatttaaaggaaatttatcaagatgttgaccgagaagcactccctctaatgaggagggcagagtttagttattggttgcgagagagtgtttcctatcatgttcaaaatcaaataagctctctaaatgattctgattatctgcagcatatatttgtactcctgactgggcggcaactagatgaagcagtgcagctggctttgtccaaaggagatgtgaggttggctagtttgttaagtcaggctggtggttctactgtgaatcgctctgatattgcaaggcaacttgatatttggagaaataaagggctggattttagtttcattgaaaaggacagattgagactctatgaattgcttgcaggaaatattcatgatgcattgcatgacatcaaaattgactggaggaggttcttaggtttattaatgtggtacaaattaccaccaaacacttcattagccattgcttttcagacttataaacattttgttgatgagggaacagctccatatcctattcccctttttattgatgaaggaacatcagaggaggttatcagttggaacacggataaccactttgacatttcattttatttaatgcttcttcatgccagcaaagagacaaaattcagctttctgaaggctatgtttagtgcattctcttctacccctgatccacttgattatcatatgatttggcatcaacgagcagtcttggaagctgtgggtgttatcaattctaatgatcttcatattctagatatgtcatttgtgtctcagcttttgtgtgtagggaaatgtcactgggccctatatgtggtccttcacttgccccttcgtgaagattatccatatcttcatgtaaatctgattcgggaaatattgttccaatacagtgaaacttggagttcagatgaatctcagcaacagttcattgaggatttaggcattcccacagattggatgcatgaggctttggtatgcatcatatttttttaattttttattcatttttttgtaaaaagaaaaatatcaatggcattcataatttgttgcagtacccttttaacctcatctttctctcatactatgtttggatgatagataatgagaggaatggagagggaatcaggggaaggacaataagttcccttgtttgtgggagtttaaaaacagattggagtggaacagaacatcaggggaccattccccatcatttcccctccatatcacaaattttgtcccctaaaattagggtggagtggggggaactcaaagggtatcggagttctatctgttcctatattaatcttccaaataagcataatgatagttttgttccattcccttccctttactttctagtacatccctcttgttccattaatgaaaaaagaaaaaaaaatacaagcacactgtatattctgattatactattaattcagtttatataaatgattttttttcaattggcttgagttataaaacctatgagatttgttttttttttaaggacaaaaaccgcttattagattcatatgggcacacattatgatcaatttatgtctaaaactgaattaaattgttgtcctggtgttctttactgattaatgggctatattaatgcttgaaatgttgcaaagttttgtatttttctttaaatgactcttattgttgtttgaatgattttgttgtggcggtgcaggcaatttattataattataatggggatcactcaaaagcccttgagcaatttcttcagtgtgcaaattggcagaaagctcatgctatttttataacttcagttgctcataggttattcttgcaaggtaagtcgtgtgtgtatattgcttggtaaaaaacaccttgggagtaccgaataatatttgccaaagtcataactatggaaaaccaaaaaataaggaaaacgttggagtaccgaataatatttgccagaaaatacctgcgtctctcatgcaagcttgctcttttatggacatttataaaaaaatcttcaagaactttcattattcatatagtatcctaacagggccttaatttcatcataattatgatgaaataatctaaaataacccagtaaatcacaaaagaaaaactcttcaacaactacatgaaaattcaataaaatattgttgacccccccacaccccattttgtcctgtatcatcattactttaaattgctgaaagtcattttatcacaacttatttcttttcaatagaagaaaattactagattttttcttcttaattccagataagtgcatcatagataacttatttaatatctttggcagcaaaacacgctgagatatggaggatagcaacttccatggaggaccataaatctgaaattgaaaactgggagttgggagctgatatttatatttcattttatttgatgagaaactcacttcaggatgataccaatgctatgactgaattggtacgtgaatttatagaagaggatcatccctcatatcatcatttatgtgaaaaatggttgttacttgatcctgtcatagtatgattgtgaagtgtaactaaatattaaacaagtttgatcctgcttgaaacatggaattgtcatgttacaaatttatcacaaaatatgatgatattttgggggcacaaccacacacacatgcagtggtgcaaaagacaataatgcctgttacccaattatttgaaatgcttctagctggtgcaatctttccatgagataatcttttaatagacttaaaaatatgatttatgaagctaggtaacagttgcagtgtttgtttgctagatcagtagagtggatactcttcgttgtgatttcaattgttagagattaagggaatactcctttttccatttgattgatcaattaaaatcatgtaatttcttgtttcaggattctcttgaaagtaaaaatgctgcttgtcaggattttgtcagtcagctaaatgaatccctagctgtttggggttgcagattacctgttgatgcaaggtatgtgttgtcctttgcagtaacttcttgttgacctgttattaggttgtgcagctcgatttctgattttataggcctgctaatatacttatccaaaaccattttttatctggcagcggacttataaagaggcaaagaaaatttgataatacagtaatatattagtttagttgctagtgttattgaatctggttttgcagtttgtttactacatcaaaaccacacgtctttatcccaataatttaagcacctgtatgtttttgacatgttatttcattagttggccatatttactatgtgatgggtcacccgtttagagaagtttcatttgccatattcacggttattactgattttgcagggtggtgtattcaagaatggcaggcgagatatgtgatttgctactatcaggtgtaggtgatggtgctacccgtgatgagcagtttaactgctttgacacttctttcagtgctcccattccagaagaccaacgctctgttcacttgcaggatgcagtgtatctttttaccagctatctctcagagattgctacgtaattccacaatctgccatttactgtcatacgaagtcaaatagaatagaacttctatttgtttgcaaggcaggatttagatctgcatatgattcgtgagatttgtggctgttatttttttttttttgtatcttggtcttgtatgaaaagtatgagatgccgctaaaaaacattcattaattttgcctgataagtatgggataaggctttgttgttgttgtagttaactgaatttctacattacttgataaaagggaactgagttttgaaattgaataaattgggaattggatattctaaatttcaacttgcgtgccacttttaaaggaaaatcttgacacaagtcaaatatggtcgagtattgttcgctatcttgaattataaaattataccataatgcattacaaattacattacattaggggcgtttgtggtattggctaatcttgtcattttattttatattcagcgattatctttgtctttgttcggtttgaatttgaggatcaattagttgtagtatataattttgacctgattgaagcttgataatatattgggcaacattgggattatttgcatattttatcattcaatttttattattttattcactgaatttttttaatttgtatagtttgtaaatgatgatgtcactaaaaagatcaatttttttaaaaataatgtcgttttgttattaatataataataaaatacataaaaataaaaaatttaaatggtaaaatatacgaaaaacaaacttgaatactaaaatacataaaattaaaaacttgaatgataaaatttgtaaaaaagaaaaatttgtaacatgatgataattaagtcataaaatatacaattaagttatgtattgttaaatcttattaaatatattttatgatttatttatttatatatatatataagtatagtataatgttatatcatattatttattaagtaaagttttataactaattcataaatgttgaaaaaagtatatcttcaaaaagaacatgagatattgaattgagttgagacttgaggcaatattatgaacattattgttttaatatataagaattaaagataaatattaataaatatatattatgttcaattaattaattgagttaaatctcttaatatgtttgtatcttattaaaattttaatgattaattattgtacgtttctattatttgttatgggtattcattctgaacttttaacactgtccaagttcatatcatatgcgaatcaattcgtggaagtctcaagtcagtctacagagggttaatatgatatatagctcactcactgaatattgtccaataataaatggacaagttgttaaaatgatagctccttgaaaccccatttacttcaaaatatatcccttggcttcggtggtggtgtaatggtgttgagccaatttgttctcacgcagagaccacggacaaggcaataggtgtcacgtggaggggtaaggttaagaatgattaggtgactcagggatatggtgcctacaaaactgtgaaatttggagaacaagtagaaaactctaaggagagaatgggatttggagatatatattatatctggtctttaatttctaatattcttttttaaattcatttatctttttttataagattatatttttaatttttggatatattaatttttttacatatttttatttgattattttctttaaatataaacgagaaataattaagcaaatagagagataataaaagataattttagaatgataatataattaatttacagatttaatatgatttattaaattaattattttttaagggatgcaaattagttaaaatgattttctaaatagggatggagggagacataacattaattgtttttttgaattttttgtattgttatttttgtttttatattatatttctgattgtaaatttctattttattcatttcgttcatttttgtaattttgttatttttgtttattcttttagggagaaaaaaaagatcaagatgtcacaaaaagaaaatgaatgctgaaagatttgagttatgtattaaatgttgaatgaaaaaaaaaattatctaattgtttatattatatggacatattaaatggaaattatttttacttattatcataaaaatgataaaatgataatttttaatcatataattattcataaatgattgatattaattttataactcaattattaataactatgattatgtagttggtgtttattattgtcacgattagaagctgagaacagttctcaaacttaaaatgcttgaagttaggttttcttgttaggtcatctaagatttatattgataccatgtatgttgcacactagatttgttctcacctccgatccctctgcagaccttctccgccgtgcgccggcgtcaccttcctcatctttgctgccaccgagatccgcaacacgcagtggtactagagttggaagtaaatctacgccccgtgcctggaactttttctcagatgcaaggaggaagcaaaggagccactggaaggaggttttggcgtgccgccacaagcaccgcatgttgcgaatctcgtggacagcggagatgaggattccggccaagaaagtgtgagaaattgttttcaatcctcaaattgtttctataagtttttatgcagtgatcagagccactcttgaccgcaatattccaagttgtttgttaatactcaatggtttccattaacctctcttgagaaaggaaagtttgcaagaactatgcagagagatgaggattccggtgaatctaggaagaaaaggaagaagttgattttaaaaataaaaaagaaaatcgtcgctgctgcgctggaaatcgccttctccagtaacatatacgacaaagagggattgtagaggttgtaaacctgaaatgaatctaacgattattaaatgtggtccataatagactatctaaaggtgacccagagtagtcatggctttttgtggtagctagataaaaagaaacgaaggcacgtgcgtgagtataaaactctaaaaacatgtatgtggaatttacatgatttttatttttataacttgtcattaatttcgttggcaatctctttcactcgcccttttactagttttttctgtttaatttcaccaattaagagagaatgtacgcttagtttcagatatgtaagttttattctaaacgaattaatggagtcatgcaaattattcaaaattttgaaacgggtgtcttttgtgtcttttactatcatttcactggcagcggtcccttatttgttactacatagctagaaaatcaaaacttttcaaaaaaaacgaaaagatgattgaataagtcagaggaacatatgttattcatctatcaaagaattaattaaaatgaaagctcattatagcaaaatttgtttaccctgcctaatactttcctatccactgaaatggcaaatctaaagagtcgacgcattatatttacaggaataaaaaaaattaaataataagagtatgttttaacctataaaaatattattataataactttcaattttttttttctttttccttcctcagatcacatgtgtcgaaacaatgttgctcatgcatatagcaacaaatgactaattaattgttgggaaaacaaatctttcggacatgaaacccaagttggtaacgaaaccttttttgtcaagtagttttcacctgtaatttgcccgcggtcaacaagcaacgtaaggaattaagaaaatgatagacatccatccgaatttgcatgtccaaaaaaagagtcaaataattatgtagaaaaggcttctctagagtccaattattttcaaaataatcaaatacgaacattttagtatgaggatccgtgataaatattttttataaattaaattttataataaatacgtccgtactactatatatgtagtatactttaggtttacaatgaataatttaaattctgaatctgatataagaatttttttaaattattaatattttttaaaaatttattaaaatgcaattaagacttgaaagagataagcatgaaagattcggccaagaaaagttcacggatcagttgacgacttgacgtacgtacttgatgacaaaggttaaagtttatattattatatgttaagcgagtttcaacaaccaagaaggtgtcgtaggggaaaaaatattacatgattgaaaatagggtgtgaatttggatatgtaaatggagatgttggcggggacggtcctatatgaaatcttgcatatgaaagatttttctcccatggggatggggatcagataaatattctctcgtgactacggtgggggatgggatcacacctccgttttaagaaaattaaataattatttttatattaattattattttatattttaaatattaaaatattaaagattgattttatatgttacttgtattaaaatttaaaattaatgttttaaactgttggtgaaactttttaagtattttttaaatttacttgtattaaaatttaaaggtaatgttttttaaaagttcatatccttcaaaaatcgtggagatctatagagacggagactcaaaaaattctatttcataacctgactttcgaaagtcttagagaaaactattataatttcaaataatcactgcatatagttaaatattattaatttgctaataaaatgagaaacaaattcttttacatctcataatataagatatcgttaagttcatatgtattggaataatctatttagagagaatctgtatttaattctctattttatatatccatacaattgagtcctttagtttccaaaatagtgtaaaatgtttcgaatcattgttattggactcggacctattcttcatgtgtaaaatttctttgaatcatcacactcatgcatagcaaacaaaattaatttttaacttaattaggaaaatgtgtgatccctaacccaagaaaaaatatatatctcttaatgatataaattcgatttcgattacccatatacaaatcttgttagtaaaaaatctaaaaatatttgtataaatattcatttaaccttaagatcgaaccctaataaatctcatataccaactcacctcaacttttaatgataattttaagtgtgtcccagagaaattgattaaaacaacaagcgatgctccgaaagtatctaatgagccacctcgatcacatctgaccaagcttcctggttagtagtacctttgaattgaataatataaaaaaagaacatgatggatgggggtagagctcactataacccacctacctccaattgctgacttttcaaagctagactgcccaaacccaaacaattggaattacatgaagaaatgttgcactataaaaaggggtgcccttcagctatgtccatcaacaaatattggaatactactcttgcattgcatactacactatacttgttaaccctttgagagttacaatggctgctgctattgaaatccccacaatagtgtttccaaactcctcttcccaacagagggtgccagtggttggaatgggatctgcccctgacttcacatgcaagaaagacacaaaggaggctatcattgaggccgtgaaacagggttacagacactttgacactgctgctgcttatggctctgaacaggctctcggtgaagctctcaaggaagctatcgatcttggcctcgtctcccgccaagacctctttgtcacttccaagctttgggtcaccgaaaatcatcctcatcttgtcgtcccagctttgcgcaaatcacttaagtgagcattttttcacacaaaaactagttataattcataattaaacttcttttatgagtttgtgcatctttgattttacctttgatagttaattctaagtacaaaattaattttaaatatgattttacatgtttaatatcctgttagagaaaagttcaaaattgattatgaattaaacaattttaagtaatatttgcattagatccaaaaatttcactaaatttaactcctaatttgattttataataaaaacatttaaacataaatcatatcatttcaaaatcaatttcattcaaaattttgtcaacgtttcaaacaagtttattctgacttctataaatgctctcttgtaaaagtttatatacatatataacttaattatatgctataactccgtctgattcattttacttcaaatatgtatatcaatgcttttacttacatcaatttttgtcgtgcagaactcttcaactagagtacttggacctgtatctcatccactggcccctgagttctcagccagggaagttctcatttccaattgaagtagaagatctcttgccttttgacgtgaagggtgtgtgggaagccatggaagagtgccagaaacttggcctcaccaaagccattggagtcagcaacttctctgtcaagaagcttcagaatctgctctctgttgcgaccatccgtcctgtggtcgatcaagtaagtctctctctctctctctctctctctctctctctctctctctctctctctctctctctctctctatctctgtatgttgtactttgttttgtttatgggaatgattaatgataagattaattaatactgttacaggtggagatgaaccttgcatggcaacagaagaagctaagagagttctgcaaagaaaatgggatagtgataactgcgttctctccactgaggaaaggtgcgagcaggggcccaaatgaagtgatggagaatgatgtgctgaaggagattgcagaggctcatgggaaatccatagcccaggttagtctgagatggttgtacgaacaaggtgtgacatttgtgccaaagagctacgataaggagaggatgaaccagaatctgcagatctttgactgggcattgacagaagaagatcatcagaaaataagtcaaatcagccagagccgtttgatcagcggacccaccaaaccccaactcagtgatctctgggatgatgaaatataaactatttactatgcagctcggagtctatttttataatccatgtttctttctttttaccaacccagctctgtctacttgtttgatttgaggtttaaataattgatgcgatgtcacttcttattttagtatttcgcaccacttcttttccccttttactcaagcccacctgcattgactatttattaatgacccatctttcgtcttcgatttgacgaggttattacttacacctttaaaagaacactataaatcatcaaatttaatgaatcatatcatgcaaggattgcaatctaaatctagcctaactaaaagaatcgtacgtcgcgtgtttgtagctccaataagccaaactgtaccacatacaaggaataaactagggacgtgctgcacatgatatgaataacctatgtttcattttttttcttcttaatactcctatttatgtgaagaaaagaattttgactaatattaaattccgttgaaaaataaattaaatatgataaaaatttattttcgtaaaaacccaaactaaaatattattcaaacgatttaattttaattcaatatattaatcacttatttaacccatttgtaattttttcttaagaaagtttgattacagtgacaaatacttgggaagtcaaatttcttttaaccaattaaaagtaaataattactactagatgatagtgaaagatgattttacactaacattaagttaaatttatattaatctaattatacaatctatacactttcctgcaagtttctgtggtaaaggcccagtcttcaaattttgcgataaggtatgaccaattattaaaaggagtggttgatcagctctactatttctagctagtgtcgttttatcaataaaaaattcagtcaatcttgtttgttaagaatcggctacaccatttacaccatatatattagtatttgtttttaaaattcaacatattaagctatatgttttcttaaatacatgcaataaatccagctgcacataaacatgatgacaataatattagatggaaaagtagaatctaaaatgagctatgtataaatggacagaaggttaacatcatgatagctgactaagattaactccaataataatggacgagataaaataatagctccctgaaatctctattatttaagaaaaatgttaatcagtattttaaatatattgattaaaaaatttaaagtaaaaatatttttatcaaaaaataaaaattatgatatctaaaatcttttttacgttatcttataatttatataataaataatttatttttttaatatcttaattaatattttaaaaatacttattaacaagacccattatttaaaaaactttgctcaaacttctttttaagctgttgaaaaattgtcttttattgaaattaaagcgttcaattttttgggctatgattaatgatttatcgtggttgtgagctagctcttagcccatgactttcaacgaaaaatcttgcactgaacaggtcaagtgagtgccatccatgtgagaaggaatcaaaacaaaactccaagtccagtccggcggcgtatctgtcactcatgactcatcatctgttaaagaggcaaagacaacaaagccaaactatactattaattactatttctgaggatgaaatagtcaacccttcttcttggtaggctatgtttatttatttaaaccttcaaatgtaattaccaaaattgtggatcaactcataattattttaacttaattaatgataggttatgttatatatttaaaagaaagaattttgtcacacgtataattttatcctatttgaataaaatcatcccatgtaaaattagtttgatcctatctttcatgttaaatacacaattaaaaaatgggagttggttctaatatattatcttacattactcataatacaccatactaatataacatgtattcaaataacattaactaaagtcaaacttaaaaaatcatgtgataagtatagtaagtattatgaaattcagttccattattgattaggtcaagataataaattattgtatcaatgatccaataagtaaactaataattactctaattttatttaatatatattaaaaaaattaaaattatatatgacaccatgataactgtagctccttctcttgatgccaaagaggtgtctaccccaaaaactgatcaaaacaaagtttgtgattcccaaactagccatgtcttcaaatcaaaattactagttataccaatctccaaccacctccctctccacgtctactgcttcgagaacgtctctgaattcgccgaccgcccatgcctcatcgttggacccgccgccaaaaccttcactacgccgagacgcaccttatttcccgcaaaattgccgctggattgtccaacctcggaatccacaagggcgacgtcgtcatgatcctcttccaaaactccgctgagttcggcttctccttcctcgccgcctccatgatcagcgccatcgccaccatcttcgcatgccaaccgccgctttgggacgttcagggtgccctgaaccacgggtacgagaaggtctcttagggggtctgtggggtccttgagggtgcagggggaggccacgtggaagacgccggagcaggcggagatggagcaggagagggcggcggcgtcgaggagatcggcggggaagagggtgaggcgggtggcagcggaggggtggaggttgaagaggtgggaagcgtcgaagtcggggaagatggtggcgtggatggtccattttttttttttttttgcataacccggtccgggtttgtagaatcagtcggattgccagattttttcaaaatgggtctgatttggtcgggttatcctgaattaaatgcatgaacattcaatagtaaaactgatcaagttaggttattagattctgattagttggacccgaccaacagagctaaaccggattttataacattcattgtagcccaagtcaactcatgatcgtggtagttggtttcttgcataacgtcgtggactcgtggtggtgttgatggtgatattttgatgtgacaccctttaaccttttcttactacttaacccaactaactcagacatgtctacttataaataaatttatttatttacctttcttcttttcttaatattatattatttataaatttcatttttatatgtatatttataaaatatacagtatatatctatttttacacttaatagaggtatttaattttaaaattaaaatacatatatttaaatatattaggagaaaaaatattttgacataattgtgaaataaaatttaaaattatttatttgcaaataaaattaaaagtaggatttatatgttattttaaaacttaatatcaacatgctagtgcatagataattttgtcattgtaggtgattgattgtcaaaaactgtattcattatgttttcagaatactttttttgttatatatgttatgttttatgaaaaaattgtatttatgttattttaaaaaaatctatatgttattataaatttatataaaaaaaatatttttttccgatgtgataattaatctcaaagacacctacacttgaatgtgcgcttttaagtctattatattaaaataaaatataagttgtctctaatatttatccaaattaatatactgttctagtaattgagtcaacccgtgaaaagtatacatttcgggtcaacatatacctaaaataaaaattaaaagcacatccatatccatggtttgaaaacataaagctatctaataagacctatggacttacgttttactgattgagtgaacccataaaaagttcagtgcatgtagacatttcgggtcaaaatatacccaaaataaaaatcaaaaccatatctatggtttgaaaacataaatctgtctaagatccagagacttaccttaagtatatctttcactttctttttaagaagaactgatcatcattaaactttcagatacggcttatttaaattgagtaacttattttagaaaataatataaataattttgagtttagtttatttaaaatgagcaattcatgtaagaagataaaatgagtagttttggtaattaatgagaaaatcaataattaatattatatatacatgtataacaaattttgcatgtgttgaaacattactcattaattggtaaaattgtttactttgcttttctttattttagaacagtcaaaattgtaaattttatggtatgtttggataagaaaatttaaatgagcaattcaacgtaagagagaattttataattaaaatatgttgtttggatattatatttaaaaaatatttgaaattctagtaatttgtggaagtattttaattacctaaaactgtagaatttcaaatttcaaattcttcgtgctcatttttgtaggaatattcacgggttgaattaatttaggtttagggtgagattgaatacaaaataatgatgcatattggattgcgttgctttgatttgggttttgaaactttgtttttccaatcctattaaagttgggaatggtttggatcatcggattatggaaaaaaaattattatatttttcaagtttgtatctctaattcttgattattttatattcttaattttcacaattacgaaaatatcaaccaattataatagtttattgttaaaatatttaaatagtaatagaatgataattgtgtaataatagaattaaaatcacacaatttactaaggatatgatttagtttttagagttccttcgtttaattcttaatatttatttgaataaaaatatacttaatatacaataaatactttctatcaaggaagagaaaaatcaaggaagagaaaagtccagcgattagttaaataaaagtgtgtgagatattataaatctagtaacaatgtcttttattctcacgaattaaaaaaaaaaaaaaaaaaaacctcactagtgccttattgttacctcacaaatctataattgttgtattgtatggtctcacattttattacttgctagaagaaagctcattaaggtgtaatgtaaaggaacatgaagccatgaattataaaatgcaaaccgaggcaaatgaaacatttgaggtagtagtagtagtttaggagtttaattatatttcatcatcccaaagatcattgagttggggcttggtgggtccactgattaaacggctctgatatatttcatctattttgtgatgatcttcttctgtcaatgcccaatcaaatatctgcaaattttggttcatcctccccttatcgtagctctttggcacgaatgtcacaccttgttcatacagccatctcagacaaacctgagctatggatttgccatgagcctctgcaatctctttcagcacatcattctccatcacttcatttgggcccctgctcgcacctttcctcagtggagagaacgcagttatcactatcccattttctttgcagaactctcttagcttcttctgttgccatgcaaggttcatctccacctgtaacagtagtaattaatcttatcattaatcattcccataaacaaaacaaaatacaacacacggaaaaagagagagagagagacttacttgatcgaccacagggcggatggtagcaacagagagcagattctgaagcttcttgacagagaagttgctgactccaatggctttggtgaggccaagtttctggcactcttccatggcttcccacacacccttcacgtcaaaaggcaagagatcttctacttcaattggaaatgagaacttccctggctgagaactcaggggccagtggatgagatacaggtccaagtactctagttgaagagttctgcacgacaaaaattgatgtaagtaaaagcattgatatatatatatatatatatatatatatatatatatatatatatttgaagtaaaatgaatcagacagagttataagttaaacataagttgtatataaatctttacaagtggggaattagaaggttgatttagtggtgaagaaagaaggaaaggggggagaggcgtgggttcgaacttcgaatctcagctccactaataaaaaaactaataaactaacaagtaacatttatcggtaaaaaaaaaaaaaaaaaaaaaagttgtgcttaaatgaagttgctcacttgagtgatttgcgcaatgctgagacaacaagatgaggttgattatcagtgacccaaagcttggaggtgacgaagaggtcttggcgggagacgagaccaaggtcgatagcttctttgagagcttcaccgagagcctgttcagagccataagcagcagcagtgtcaaagtgtctgtaaccctgtttcacggcctcaatgatagcctcctttgtgtctttcttgcatgtgaagtcaggggcagaccccattccaaccactggcaccctctgttgggaagaggagtttggaaacaccattgtggggatttcaatagcagcagccattgtaagtacgtagcttcttattgtattactgttaatgcagttgatggatggacaaagcccctttttatacaacaacaacattgcttcatgtaatgtattctattctattcaaattccaattacaattccagctatttgggcataccaactttgactatggaattggaggttaggtgcattatgcctctaccgacccattatattattttttaataacaatatataaacatctcattattttaaatatatatatctaatctttttatttacttttgtctttttttttcttgtgatatgaatagttttattatataatttttttctctaagtgttaaataatttttttcttgtcatatatttttttctttttttattgaataaagaagccatttcaacgttattctttgactctttctctttttttctgaggagggaggatttgtttgcaatttttttaattccgaatgttttgttgggaaatcgagggggtaaatatcggggagatttacacgagcaatcatataagtgaattaaacatcacactttaaatcaaaaccttaagtctcaagttcatggatcttctctttatttatatgatatttaacttttctatttttatctgatgttggactttaactcatattccatcatgtttgttgttgctttttttagtcacaggcatggtttttcattacgaaaattttgcttcagacgtttgaaaacgtaatatttttggcttttagctttcaacaaaaaataccgtgatttttgtttttttatctctctaaatagtagtttgtttttttattaacaggacatgatgattattaatcacttaagcaaatttcgacctactctatatcacaccaggaaataaaataattgatgacaaactttataaaatagtgggtaggctgcattcttcaaaactgctgcatgatcatttcaggacgcgattgttgactgcaattatcttaaaagaatcaattatatatgtgtgtgtatgtgtgcgcctcctaaaatagaattgactatttttatcttgttggccttatggaaaagtttgcgtaagaattgcagtattttccatgcatatagtttaggattgaaaagctagtgtgtaaagttagatagcagacgatacttcacacaaaatagaaaaaaaaaaaaaaaatcaccatctaattacgataacgattaatatttgtgagaatgagttaatatctatgctttgtatattcaacaagccctttctatcaagtttacgagtgatgatacatgaatattcaatgttttttattcatctaacaaatatttctcatttctccccacattatctataaaacttacttttttcacttttatttttttcactaggtgttcataagcataggatgatctataatttctctaagttggcaatgcttatttgtcacatccaattttcaaatcaactctttaaaaatgcatttgaaggactggaaagtcagcagctgagctgactctttaatttttctaaactatatccctatagctcgcctatttagacttttgtgttgttgtatagctcttcatccattaagataaactaacagagaaattagttcatgtaatcttttatactattatttaattataagttaatttatatgatacgcttgataatttttataataattattttaaaaatatacttattataatttttaattgattgccagtgtaaaatatttggcactaactatatattaaaattaaactcaaattgaaaacaattctcataaattttctcacctctaataatggaaatcgaggatattgactataagttttcttctttcttgagtgatttggccggggttcaaagaaaaatgacttttacttgtactcttagaatttgatacttgaatatctcacggattaccttataattgactaatatattttactagaatatcttagaactaaggtgtaatatatttagattttttttttttactgaaaaaaaaatgatctacttgattgagtacttatagttaagactcttttaaaaaaatatatattgaatatatgatgcatcaatatcatgataatttatttcaaaggatctaattgaatcttttaataataaagggctaaattgaaagaaaaaaatagacaaaaaaagtaattaaaccaatttcaaaatccatctctcatttttgtctcaacggtctcttttaactcttgccatttttatcaacataagttacccatcaatactttatcggtgacaaaacaaatctgaactaagcgtttgcatattatgttacgatccatctcatatattatattattatgttactcttgccatttttatcaacataagttaccatgaaatgctggaaatcccagaaactgagggagcttactggggtggtccctttgtagcccttcgaggcattgctgccacatacatttcatctcttcctcttaccattgctgagttccaaaacaaagataccatttttctctcacaaagccaaattctatatagattaaagacgcacacaacacagcacagcactaaactcaactctatccgcttcagcttttgtatgacagagacagacaactggctcaaattgcatgttcatatatatggggaagaacatatccaatattcaaataccagttactgaagttaagacacctaaaaacaatcagttatttaactttaaaataatatttaaaattgatttttttgctaagaataaataacttgcattttgcattttttatcgaaaaaattacttgcatttttatttatttaaattaattgtatacattttttataaatttttaattccatattttaaagttttatttaaattaaaaaaatacccgtatgataagaatatttgttagtttattattttttaattctaagattcttagcaagggatattgttattttcctgggccactactctaaactcacctcagcccatacagtttaaagagataaagcaaggcatgctcatgctatctgtactcttattttgctctttgcatgctcgcccctattttgattcttatattgggaattacagtgagactactagcaactgtatggttagaaagggaaatatccacagggatacaataacacattgaacctgaatccaaaataatatttgtaatttattataaaaaaatatttttggaaactataatcatatactagaacatacttttattatgaaaattaattcctgtaaaatctattaaaaaaaagtgaagttgtgaagataagaaaaaagggtattttgggaaaatgccaaaaatagaaggtgtgaagaacaaaaaggaaggtgtaaataacatgataaatatgttgtccaaaagacagtaggccctacatacaacatatttaaaagtccacttgtttgaatgtgtttgaattttggttaggagagatccaaaaatatgtttgagagtaaaattagtcatgtttggttgtcctataaaaatatgtttaagaataaaattttgctctaaggttacaaaacatgcttttaaataaattaatcctaaatgtgtttgagtagtaagttagagtgaagaagcctcatactatttttactatttttttaagcgtacaatgataacaataaaatttaaatctctaacatattatgtgaattattcaaactcttcactattagacggattcatattagataaaaataaattaaacatatatatgtgagaaggacttgcatgtcttgatcttacattgaatgttgtgtgaaggtacatatgtttccctcatgtcataataatcgatggagatctatttgcactttgcagcctgctttatttttatccctaagtggcagtcactaagtagtagttgttacctctacttttaatctcgcatttatgcattccattactactatgaaagagaaatttacaggcaaataagttaaagcgccagtacaacagatccatatccagttttatggtaaaactcgcaaaccagtattagatgcacctcattatattggatgtatcttctaaacctgattcatatacctatatggactatggtgcccgcgaccgaggttcattcgaatctttagtacgggcgggtggccaacgacatggaacacaaagttctaagtgacgtgaacaaatcatataaataatctacatatttatttgaacaaagaaagttaccctgcatgcagaatcacacaataaggaccataacatacttcaattcattggatcagagctcacagtacataaacagatcgaaatagtacatgccatgtggtccttgtactgatggttggctttcgtaaacttaagtgggtcatcactcattcctagctagacattttattagatcactaatcaaagaaaagaaaagacatggagcaacaacacattatggcatgatgcaactaaaacagtcacataaactgcacatttcccctcttcacattctttactcagtcttctcagttggagcctctgtgcctgtgactgtgacctcctcactcttctcagcttctgcttctgcaatcacttcctcgtctttcttttcagctgacccttctttcacctcctcacttttctctgccggggcttctgtgttagcctcttccttagcttcagcctcagcttctttctcttccttagcaacatcttctttctgtgtttctatcactacttctgcagcttctggtgtcttaacctcagcaggatcagcattttcttttgcttccacagcagcttcttgcttcaaagtttcctcttctgtcttctcaactgttggctcttctgtgacagtttcaggcacaacttcaaccgagggcttgtcttctgaagctgcaggttgtggggcctcagtactttcctccttggtttgctcagtgacgacagtttctggtgttggtgctggtgttggagtctcaaaaacttcttctgtgttcttctcctcatcagccttcagtgatgcctcttttgtgtcctcagggagggcaaactttgctgacacaacctacaatttcgaattccaacagacaaagacatattcagatgaaaattcatattttgtttattagaattccaacttgaactctgctgagataaaaacttaataaggtggtggacatgcagtttaatttaaacacttcttactcttctttgtaactattggttaatgtatcacttctcatagttgttgcaatatatattatataaggataaagtttcaaagctgtcagattaatttagatttaatacgtcttttaatactctaacaaatatgactgatggaaaaggcatatgattcgtgtggcttctctgtctgatgacaaactaattgaaatttgcattcagctactttgtacatttctatataattttctgaggaaaacaagtatatgaactctttttgacaaagctatatatatattgataagatgccaagtgcctgctgtcattttactgaatttaattaattaggtgacaagaatttcaggaaaaaaaatgacggttggagtattgaagctaaagaaatgaataacttcctgtctaagataacacagaagcaagggtatgatcatcaatatcatcaacatcaacagcacctttaacccaaattaattagggtcggtgaagggtatgatgatatatattaaaaaaaaaaaaaaacccgaagcaagtatatggttgagatcaaactgaaaataaaagaaattgatgccaaattaaaattaacataagggaatttatttgcgggttctgaactgagctaccatgtgaactagagtagcaagtattttagtagagttacctctacagtggccattggaataccaaagaaaatgtaactgattgaaaagaagcaaagttgagagtgatatagaaagctaaaagcttttgatgaaaagaaatgagcattaagagtggtttataaagaggtaaaggcctcaagttgatcagagaaacggagaggtggggacacttcaagaatcttgggatttgacgcatccttcactgaatgttaataagcatgtttggcaataatggtgacaaaggcttagagatgaggttatattattattttataatggttatttcagatctcctctactgggaggctgaataatggagcacgatttttcattgagatcatcattcttttggttctaacattctgtgctttgtgcagtcggatttacagggggatttaccaaattcaatgcatggttattcaatcatgatttagtggtaaaataataaaaattgcaatgtccttaaaacaaacggttctttaagctaatttaacagtaaataatactgtagtacatttcttatgtacaactcaaattcatctttgagaaatttaatgacaggatactcaaattataacgggtagatagataatttttcttcttgtgtaagtctcctagatgatctcctttcttcttcaaataatgttcggcaatccaaatgatagggtatttacaaaagacactttaaagtttaagtaagaggtcttggttgataccaataattatgagtaataaataagaattaacagtaattttacctatacttcaatattcatgtaactatttatacacactttagtggggcttgaacctatgtaccatttctcaatattacctttttagctaatgtatctttaattatcattaaagagttgaatttttcaataatgcttgtttattagctaatttagatagttttacctttaaataaggtgaggtgagagtgttctgtgttcaatcatgtcgaatactcgcatactatcctatagaaatagtgtgtgatacagtacccgattattcagcatggccgaatacttcagagtgatatgagtagagaaagtaacctttgggaatcagggtaacaaaagtgtttgggtattcaacatggccgaatacttgacacaccatgaacagaaaacaacctttgaaggttaggatactaatagtgatcgggtagcaatcatgaatataacaatctttgaataacatggaaacaacaatgtctcgatattcaatatggttgaatacctaacacttctagaggatatacttcaatgtactataaaagttttatcaaatatatttttgaatattcgactaggccaaatacttatctgatatccaatataataagattgatctcttattataattgaagactaaatttttatttgcacaaagttacttgtcataactttctcaattgataacaattattataagggcgacaagatgacaacatgaatgaatatctttaaaaaattactaaaaaaattaatggcagaaaaaattcatacgaaagtagtacaaatcatgtatagaaagatttgattggatatcaatttgtaactttcacttataataaaatatttattatgtgccatcatattcacaaaccggtgaaatcaaaagcgtcataatattcgtaacaaaaaactattatgcttttaaaaaataaatgaacaagaattataataattgtaaggaaatgataataatcatttaattattgattatgttcaataaaattatttgaaaatttagtcaaaagcttaaagttgataactgaaatgttaacttattaaagatatggtcgatagaacatttcaactcatttctaaaaaaaaaaaaaaaaaaatattagctaaaaaatttattggattatccaataattaaacttagtagcttctaacattttttgaaagattacttgaagtagcattttttaaaatattatcttctaatttttagttttttatattttctttcatttttatccttaatatatatatcaaatttcttagttacatttgaaaaaaaaatatgattttattgtttattgttattttacactttttatttataagaatttataagaatttggtaaaactaactattgaagtaactcaaatgtataaaataacataaaaataaaaataattatttatttgaaaatgtaataggaaattagataaatatatggaagagaataaaaatataaaaaaagttaaaagttaggatttaaaaaatgctacttcaaataaaaactcaataaacactaaaaattattaaaaagttattaaaaaatttatttactaaatagttaaacaattttttcaatcaataaaaacatataaaaattaattgaaatatcttttcgaatataatataatcattattagctatgaaaattaaatttacatatgtgagatgggagtattagattattatgtggatcttctcctgccaatatcctctctctagttccgtctagtctttctatctctctactttctatttactttttcatcatttattttcctctcttcattctttttgagcttctaattttattttttgtgctggagagacaataggagcaagagaggatccaatttcattatgttagggtagggatggcaaaatgggcttggcccgtcgggccggcccgcgtagcccgcaaaaaaacgcgggctgggttgataatatcaacccgcaaatcaaaagtgggccgggctggcccgccccgcaaaattgcgggccaaacgcggggcgaggcgggccagcccgctgggcctatattatttaaatattaaatattaaaattaaataaatatatttaacatattttgaaataggtatatttttttaatttatactcttttgcactctcataattaacttctaagttttaatattaaaatggttatgataatgatactttcaaatagtttttcattactagcatattacacttttggacagtttataaccgtaaattccatttgcaaatggtataattttatgaattatcacatgacatcatttatttagcattaattttaaattatttacttttatttaactttgtgttttttttaattatcatatttgtatttttttataatttttttgtattttattttttaaattgactttttttatttttttttaatttttgatgcgggctggcccgctagcccgctggcccgcattaaagcggggcgggctggcatttgtagcccactttacaaaagcgggccgggccagcccgccccgcatttttcgcgggccgggccggcccgccccatttttttgcgggccggcccgtttgccatccctatgttagggtcgatccttgagcctaagtcaatggagtgataaccttgtattcaaaattgagaggtttaaaataattttagtttgggaagtcttaaattataatcatagtttgaataaaaacttatctttaattcaaatcacgattctaggtttccaatctgaaaataactacgacttaccagatatttattataaattattttattaacattatgaatatatataaattgtaaatattttagcatcgctgtaaagtgtaaactgtaaatttataggttagcaataattttatatttttattttttgggtgtgcattggaatgaaatctttcatcgatcccaaacaaacaaacaaacaaacaaataaattaatgaagaagaaaccgtacggtagcaggtagtagtccagatcagaccctgacgaaaataaagcaacaaaccgtcgttcacctaaactatctatctgggccttgtcggctggtgggccattggacccatagtgggccctgcaaggatattcatatctgggcccattcagattacacctaccacgtagtagtggttttgtggctgctttctctttttgattctgatgtgattacgagaatgagactataatggcaaaatcaaaatagatgaataatcatgccgccattgaaatgttgtgtgtgctatttgccaacgggtaaagttttgtcacacactactatttatacaattgtgatggcatggcactcgcgtgggaagggaatagagtgtgtctctctgctccccatcctcatttatcttcattcttaagctaattttgtttcttattatccattctccgatttcccatgcattcccacaaggatctcaacattgtaattataataaattgccaattatcttttaacacaatttaaattataaaaatatgaattaagttattaagttattatattgaaagcctaaaaacattatgtttgtccaaattgaactaagttttgattttttaaataaaatcttagaattgaatcctataaatatatataaaaaaattattgaaaaaaatatctcactaaaaaattttctcacataaaaattaatcataaacaaaattgatgaatttttgcacatataatataataaataaaaacattaaaaactaagagtacatttatatattatatgttaagggaaaaaattatatatatatatatatatatatatatatatttgaatttagaattaagatctaattcaattccatcaaactaacaatcaacatataaaaatgagaactacccgaactttattaaattaaaaaaaattatttacatttatgtcctaaattcgagatcttaagcataacaatcgtaacaagaatccttaagaccttaacccacagcacagaattgccgatcattgtttgcctccaactccaaaatagaatgatgaggcctaagaataacaatttgtgtatcacatcaccattcacattggaattatttacctaacaaccacacacataacagtaactctggtagctgtaaatctggaaacagacaaaaaaaattcttgcaaaatgtgtttgtccgaggtttgaaaaggtgcaaataatgccttagtaaaaaacactaggcaacaataccatctttcttaatatgttgctgacatcatgactgcatttttgcaatccgagagtaacaaaaaatgaaacaaaaaaaaattccaatgtttattttattagcaaaataaggcccgtaagtaaccttttacttttatgctccacaagtaaataattttaatgaaattatcatctatactttttatgatagagtatatgagaatcggtgacacaagtacttttaggtctcatttcatatgatacctttgataaattttgaatgtagtttagtgggctgtctgctatcttgcgtggaaatgcccatgatattgacaccctctttttgctctttactctctccactcttttcttttatattctcaaaatatccatatttcctctcaccttctcaaaatatccctattacactagctattaggttcatctatctacatacatacataactaaacttcaattgaaactttgagagtagtcgaatcaaaattttaactcataatgatgattgttaatctaattcagttatatagtctttatttcaatatttttacatcatcagatcgaaactttaacttcaacaatcattgatatgattcaatttatgatgcgattaatttaatcaattgaaatcttcattaatatcacataattaaaattaatatctttaaaatcattaaaaatattattttaaaacaattaactatatatatatataaaataaaaattatactatgtcaacaaatttaaaataaattttaattttgataataaatacatttgaaaattacatattaacatcatatcaacaataaattaaataattttttaacaattacatagtattatatattcctgtttattatttttatattatttttgaatttatatttttcatataagaaaaatagacttgaaaataaaaaataaatgtttgatcatgatttttctctcttaatatttattttatatattatttgaataaaaatatactcttaacatacaataaatagcaacacaagtgatttcgataaaaataaaaagataaaaagaagatttacaaaaatattttaagagcattttttttactgtatttttcattgactcatgtatatcatcttagttaaaaagattatattttcaaagtgatgcttatttgtcagtaaatagtaagatatataattttttaatcctaaaatttacaaaattgaaatgaaaattcaccaaaacatttttggtctccttatcagatgagtcaatatatataaccatgtcatgatgtcagtaacatttacaaagatttcggatcaccacatgaccatttccgaaaattagccataaatttatgtctcttcctaaaacattgccaacaagacaaacaagccatttttcctttgccatcccttgcctttttttgcttctggttattggtcgttgttaggttttgtgagacacaaactattattgtttttttttttcagtttcactaatcccttcaaaacattatttttacccattgttgccttacttagtcttcgttgcttaattatattccatttgtttgtttgttgggattttttggtcatattattgttgttccctgtgacggttgatgagttaaccaccttccctgttggagctgtttcaagttccaagaagatggggttcgatgaaaacaaagaaactggagagaaaagtgatcatgcaaatgaagaacattataaaagtgaaggcgagcccttgagcaggcacgtgagtgagtcctctatctatgcaactgaagatgaggaggatgaagttggatccaaattacaattgggtcctcagtgcactcttaaagagcaccttgagaaagataaggtttgtttctctgtgtctgctgaaatttatcgtcaggtcatgtttcatgcttcattccttattgattaattttcttttccatttctttttttgaattttgggattaatataggatgatgagagtttaagaagatggaaggaacaactccttggaagtgtggatgtgaacaatgctgcaggtttatatatcacttaattaatttttcccttaattataagcattctttttttattgtattcagaagaatcagaacacattagacatttgacttattctgttcaagttggtcggactattgcgcaagcatgaaagcttataatattcaaatttacattatattttatttctaaaattaatataaggctatgttattagttattactgcttaattaataataataataataataataataataataataataataataataaatgtaagtgttgacttatgcaactacaggaagattaacatgaggaacatgcaaattggcattttctgttcatgtaattaacagtttgagaaatcataatattcactataatccattaaaacttcaaaactagtagttgggatttttgttttgtgaacaataatcagaagatttcttttatttcttttatatgttctttttttctaaacctgtatcaattattacgttaatctttttatttccagaaattctggaccctgaagtgaatattacttgtttgtctatcatctctcctgatagagatgacattgttctttccattcctgaaaatgggaatccaaagggtttatggtttactcttaaagaaggtagtcattaccgcttgaaattcaccttccatgtgagcaataatattgtgtctggcttgaaatacaccaatactgtttggaagactggtgtcaaaggtaagttttttttttttgtgccaaatctatttcaaattaattaaacttataaacatgcaaaacttgatcaagcactctcttacaacaattctaatttcagtggatagctcaaaagagatgctaggaactttcagccctcaggcagagccttacacacatgagatgccagaagaaaccactccctctgggctatttgcaagaggatcatattctgcaagatcaaaggtaatattacttctaaatacgttgaacttgattgtacaaatatacacatgcactcacacacacaggttcataattggattatatatattcctcttaaatgttgcatagaatagtcacgacggctcactatctgcctggggtgtggggctacctattattcattcgtccctttaatcactactatacttgattcaaagggttctcaatcattttattcgaagtttatcatggttttgtcatttcagtttatcacttccataattttccatttacttctttcattatttcctcattttttgtaatgtttctttattagaagtaccatattgtctggctttaatttaatatattctggtgttagtttccttgtaaatggattacggtcagtagtggaatcgaggtttgttggtcaccaacttcttgtgttgttcttaatagtatatattgcatatcatcatagtagtaaaatttgaagcggtgcttcactgcatactatgggatagaataacatttgtattttcttctattgttgtatgataatgaattaatgatacaaccatatactatcatattttttctttttgcagtttcttgatgatgacaacaaatgctacttggagattaactatacttttgatattaggaaggaatgggcttgaacgaagatggcaatatacccaatttgcatctgcaatagtaattcttattcattttgtcaaatttctattgtattgacttgagaaattcagatatatgttaggtactaaattcatgtttgtactaaaatattttttttttggtattgactaaaatagacagaggcaaagaagactcttttgtaactttcccaataaaagttccctagttgtcaacttctttagtttttatatctcttcttagctgcattacttttgccaatctaaatttgggacacaataatctttgtgctagtccggttgcttgagttttgaatgtaatttgaagtatgtgggccgggcttttcaaccaatgaaaaatggaaaaataatctattttattgggctactaaaattccggataagcaaattcataagagaaaaaaagttatattacagattaacaaatccgcaaattagatctgataaaaaaaagtgcaagaaggaggaagacacaagaagggaatgaagggtgagatataatgggggtttaaagtcgaatgtgcaggaaataaggtttaagagaaaaagaagggtaatttgggaatactcaaaattatgagggcgcaagatgtaaaaaacgagaaattgaaactaagtaagaagaccaaaattgtattaagtttttcttgatgggttaggttggaccatcaactcttttaaaaaataaaattaaataaataaattattttatttgtcttaacttttttccaaatttgattttcaaatataattaaaaaaacatgttattaaactagtaaatcaaataaataattaaccaataatcataaaaaaatataaatgttaaatgtaatttaaaagattgatggattaaatgggttgggttatacgagttacgaaaatcccagtcgaactcaacctatttgaacttattatataagtcaaattattggatttaactcgttttaacaccataatgttggtctcttatgaccgatgtcttattttttaggctagcagtactcgccttatccatcggtagttaccgttttctaaccacttttgttacatttgctgattaaacttgaatacataattttttctaacattattacagtccgtttttttatagggaaacattgctacagtccgttagaattgcatctaatgatgattttctagacaggttagtgtcttggaaaatcaaaacgtggtcctatatatgccttgatggttacacaagcctaatcaatcaatttaataaatcttgagcactaagcctattacaagtcttgaattgacaacctacaaaagattattcaatatgattttgcccagcatccataatgtccgtaattatatacatatggtatacggaaattatgagtaatgaactttaaccataagcataagttttaatttaatattatggaacaaaatttagttagttaaacttaacacaatttttttcctacatcacatatatcttacaaaaagtaattttatttgagttgaataatatcattataaatgataaaactcttccgtaatttcatatttaaaaatttaacttgaggttttttattaaattgaaacaaatcctcaccagttaattcatgtgttccatggtgacacaaaaaaaaataattattgtgaaacaatatagtttgaggacttaaagagttaaagagaaatgcaaggaagagattatcaaaaaacttgatctatcattcatttttcatagttatggaagctccgtgcattttttatatagagaaaacaagtttattttatttcatgctagtcaccacatctttgattgtagtcatgtgcacttaatagttcatatcaaaggtaaatgattattttgctccctagatatataaattaatgacaatttagttttcaaaagaataaattaaatatgtaaaaaatataataattatgtattattatataatataatgttaaattgattcttaaaaaatataaattaatatcaaattaatcttttaacgttaaaaaagttaacgacatagagttacacaatttcaagaattaaacgataatttaatttagaaaaaaaatacttttccattgtaggttttggggcatgtgaacagcatggtcggatattagcattgccgcattggtatggagggctaaacgtcagcttcatttttggtgatgaaaataaataaactagaaatgaagtagaaaccatttatgtatgtcggttagctagatgataaaatggggagatggaaaatggtggggtagagtgcaaggttggtctatgatgggttaaagaagtaatttagttaaagcggatatggaaaggccaccatacaaggagagaaaaaagtgtgttccagagaagcattttccattaaagtataatatgtcttcaccaaagaaccaccctcaagttagaagcatctctttgctgtagctgtagccaatactaatacccttccagctggtatacgtaccctccattctatctttatataccctccttccattctcattcctcgtccttcacattctccttctctctctctgaattcctcttattcatgtctgtgtgctcttctatctcaatatctttcctttcctttaatttacttttgttctgaatgtcactcaatttatggttaggtgcaaacttttagcttttcttgccttttcacatttgaatatcatttttgtctcatgggtgcttgtgattttggatcagctagtctagatctgtctcatttcattatggggttcatgaaatcatgtgaattctgtcactgtgtacttgactggtctaagtctaactcacctacgtttggcttgggtttgacaacaagttagaaactttgtgaggaaaatgaactagtaatggattcattccattggcactggttgggggtggatgattgatagtttcaaaaaagaaaatagaaaatctttcaacattcatttcattaggtgtctgtctgatctcgaatttagcatttggaaatttagtcttctgggagttctgaatttaacatttttcagtagtgtgaagcaaaagtagtacattttaagtgttattcgcttctatcaaattgttatagtgttcatatcatactcggatctgcatttccttctgcttgctctggttcaattcgcattcatagatcttaccttgtgcatttcatattctgttgaatatcttattatttttcttttgttcctctatgttaacttttgtaagatctggttccagccattatgttagtctattattagtaagatgttgacaactttttactgagatgtaaagaaggttaggtaaaaaaaaaaaattgaggggtttatgattttttatttattggagattgagtttgaactgggagttcattttttattcccgcattatttaactttttcacaggttggtaggttttgttatgatgagatctaaccactgtggagctcttttcatacaggaatttggagagactgttgatatagcaaggtaggataaaccagtggccaaggaagatatggagttttctatgattttcattgttagcaacattatgctgcttttcagttcagcatttgccaaaactgctagtcctccctctctgagcccaactccagcaccagccccggcaccggacttcgtgaacctcactgagttactcagtgttgctggtccatttcacaccttccttggataccttgagtccactaaagtgattgacactttccaaaaccaagccaacaacactgaagaaggaattaccatctttgttcctaaggacagtgcattcaatgctgtaaagaaaactaccctatccaacctcacctctaaccagctaaagcaagtgatcctcttccatgccttgccacatttctattctctggcggagttcacaagccttagccaaaccagctctactcccacatttgccggaggggattacactttgaatttcactgataattctgggacggtgcacattagttcaggatggtccaagaccagggtgagcagtgctgttcatgccacagatcctgttgcaatatatcaagttgacaaggtgctactccctgaggccatttttggcactgatattcctcctgcacctgctcctgcaccaactcctgatattgcccctgctgctgattctccaactgaacacagtgcagatagcaaagcatcatctccatcatccactcatgatggctccccttctcacaagctcatcagctatggaatctgggccaaccttgtcttggcaacttttggtgtgctggtgctcttctgatggcactcttccaattgaatatttaatttagattatgtttatgtatctacatttggtgccacttgctttgatttgaatccatttttttgaacataagtgttattcaatgtatgtatgaatgtgatttcttctattatactatttttttgttaaatctcatagcatgcggatgtgatgttatgtggttgtcatgttatgactttatctacctttttttgagagttttaatgccgtcacttaaagttaaagtctattccgaaagttgattttattctctaaagggatgtttccggaaatcaaatgatttacaagctctttttacggtagctgaaattaaattaaagatgctgattttatattggaccttttaacgttccagctcctgaagacccggtattttccctatcctagtggcatgtgaaaggagatgccgtttagaaaaaaaaataatcaaggatatatttttttcaatccagatcttgtaagtattattaacatttttttttgggtctttgacagctttttgggtgcctagcgatttcataattcaaactctaatatttacaaaaagttttttggtccttgtaagtaaaactcgcacggtgttgaagtcttgaactcaatttccaatgctaccttgctctgttgggtttataaagcctactgtatttgattgatacttcctcgacgaaaaagaaatgttgataattgtgagttgctacagtaattttggccaacaaatctttgcaatgtcgttttcaaaataactacaaagataattgaaaattggttcaagtatgagctagacgactttgtttcacctaatcagtacagtttcactcaggcaggcacaattccaataacagttatagtggagacagaagtgtatattaaggtttttatggtatctaagattgatcattaaaatctatagcattatggtaattaaggttgatcatgattcatgaaaggctatagctttatgttatgcgttgagcttttttcaatgatacgcttcttgagatggaattaaatctggctttttgctgagttaattttgaagtgtatatattcctttgctctttacgtatgccttaactcttaagagggttgcacaaacgccactgcatcaaagcattaatattaaagggttattatggatgcctataaaattagccaaagttggtcttccggtctcctcccatcttttctttgcttgctaatgctcactgttttattctttttggagaactggatgcatctatcagtcaaatgcaaatggggtttggagtttggacctttactgttccagttggactccaggccagaagctgagtaaagtaaaaacaagattatttcagaagtatttgtttcagagggatcggacctagggaaaataataaaatttattcaaatgaaagtgacatttttgtaattaaaaaataataataaacaagattattatcaaattggtatagtttagtggggaagatcatggatcaatttccacataatacttttttgggaaggagtgatgatgagcttgtaattaagtctcggatcgaaaattagtcttatatcatactcaaaatgtcaaagtttgtgaaatgcctggggattctaacaaaatgatttttttttctaattatcatgattacaaaaaaaaaatgaacaactccttgtttgattagtttgtaaataaaaaaaaaaaaaaaactaagttaagaatatataaggttagtccaacggttgaagaataatgaaggaaggggggacatatctcggattcgaatcctcaaactgacatttttgaaaaaactaacaaattaatatttattgataaaaaaataaacaaagttattattatgtccttcaaatcatgaataggatttcaagtattaatgtggtgtccatttccaacaatgaaacaattttgagaggatagaaattagtgtttttggtttgatagggactataaaggtgagaaataattttaaaaataatgagattcatttttattattattttacctatttttactcatctctttatctctttcatatttctttttaatcaaacaactttatttcttacatattttttcttttcttttttatttctatctacactatttctctcctttcaactcaacataacctaaaccatgatggcttttttatcaatatattttaaaaaaattaagtctgctttctttttgttgagatttattttatctgttatggtttgcttttgttttgttaataagtccctatttgatttgttaggaagtatttttataaatatagccgataaatttatgtgcatgattttgaaggaaaaaaataagagaaaaaagcaaaataaatattgaaatcttagaaaaatagatagaaactagtagaatttgagtttgcaccaaatttttttttttgtaaatattgagttttaagtagttttgttaacttttgtataaaaataacaatacattgtctttgttttggaatcaagaatttctaataatgttttcaactttaatcgtgtaagaaaacaaatttttggtgtttaaaaatgctgaaaaggttaaacgatgcactgttctagcatcactattcactagtatatcaattcccaaatgccagttaacatcctagacgcttgaccaactcctcgaactctaattgcaaaaaaatgttgaacatcgatagcgttccagggtccctgatgctagcctgtgtgggagacactagactactagcaaaatcacaagggactaaatatgttattagagaaaaaatatagagaccaaaaatattattaaaaaaatgtttagagacttaaaaacaattttttttaaaagtttaaggaccaaaaatattaaatcttactttgtaattgaactgttgttcatttaatgaaagttttattcatgagattgagtaatgtactctgttctcaatgctttcttgcaactaaccattgatgagatttgtcttaaacgtgtgcatgatgagaaatcatatatgtgtgatttggatatgtccttatattcttaacaactaaatatttaatacatattgtgtctctttggaggaacctttataacttaactgttgtaatatctttttgcaggaacctaccatttttcactaaaaatctcgtccatgctagaagacacatcgcttaaaatctcaaattgtagtccactcaaaagtccatcttggctaacattaatcagaattcaatttcgttcagtgtcatcccaagcatctaatccatcttatatattagacaaattaatagtataagtgactagtaaagaagttaaatacttgtacaacttcgtgtgaaaaacttaacattgaagtaacatttgaaaataaaaggtgtttttaatgtcagttagatagatattaaaggtcaactagagtaaatgtcaaagcggttgcatgtgatagttaagggattggaccatacatgaatggacctagagctctcacgaggttggctatatttcatttagaaaagagttgaccttcctttttatgatgcacaccgttctatttgtgtgcaatttcaactttttaactatcttcgtcgtctaagtataacatgcttcatattcaacatgacatttaaaaataagaaagttttggaaatgatggttcacatttatataaaaacataccattaatgaacttaaagtaaaaatatttttattaaaaaataaaaaattatgttattcataatatttctgtgttttactataatttttatactaaatgttttttccttttaattccaccaatattataagaacactaattaactagattattaattaataatacatgcataataacttataatttaatgtgacattgtcttgcaaatcttccatataaaaattcttattattttataaattatatgaaataaaaaaaatgtatttaatatcttgaaaacttagaaagtattcaatagttttttatctaataaataagaagattaataggattttcttagataagaattaaaattgttattttctttaaatcttgtatttggtttgattgcgatgaaaatgaactttctttttattgtttttggataaacagatacttaaatatcttcatcttaaagataaacgtgcgaaggttaggtatggatgtatataaaggaaagcggaaataaatgtcgttactgagtctgagttcggaattttttttaaatgaattcattggattgcccttgaaccgaaccttactttatggtaaaatatagcacgagattaagaacattacatatatataattttatataataacgacgaaaaaattgtagaaggcgatgagatattttttggcttgtgaaaaagcaacaaaatagataaaaacaatacgaaagcgaaggaaagaggagtgtggggattctgaattgatgccacatgtcattcttgtttaatatatatatatatatatatatatatatatatatatatcatttagcaattagcaattggcacttgcaatagcatagaacaaaaatttaattgatgtatcttaattgataatatacgataaatttataagaaaaaatttgaatttgattttcataaaatacacttttatatagagattatgaactttgactaagtcttaatgaaaaattaatttcataactaaaaaaaaaacaaaatttatagaaataacttaaaagtatcattagagagtctaacgagtgaaagaaagaaaagcattgtattggtaccgtttgattcgatagtatttgcgttgcattccctttcttcgcgggtcctttcgtttttttctctccaccccatttcctctttcgcacaatcaaataacacaagcctctctctctctctctctctctctgaagaagaagaagaagctccacgcaaatacaatgacgaatccttttgatctcgctctccttttctgactttcttagggacgttttctcaatactcctttctcaatcgcttcgtgccagccttgtcgcaatctactgttggatcggtgtaatttaaatattcacgcatcgttgatttgatttcaaaacaaatgtgttatctctattggcttataaacatttgatttccgtgtgttgttccgagtgtttgttgtttttctccaaccgagtcgaacatgtctagtttcgtcggtgtccttgtttctgatcaatggcttcagagccagttcacccaagtcgaacttcgaaccctcaaatccaaggtatgtttctttcttcctctcttctgatgttttttttttctcttcgacaccacaatctcggactcagaacacgcattgtgtatgtttgttacgttctttctagtatgtgtcggaaaggactcaatcgggacgtgttactgtcggaaatttgccacctatttttaagaaattgaagggtttctctgaactgttcaccgaggatgagattaaggatgccttggcagagtcatatcagaacatggatgaagagattgattttgagtccttccttagggtgagtttttgtttttttatttttattttaccccctgagaagttaaggcatggtttctgaattcctcctatgtgttcatgtgtttcttaatttaacttttactgtatgtatttagaatggtctgtttattgctttctcaaagaaattattggaaaatatacactacaatgtcatttgatgttcatattgcctggactcttcacatatatatgcacctaacatgaaaccgcgatttgtgagtacttttgtaggtattaattatatttatattggacctagcaacttattcagtgacattggatggcaggcacatttgaatcttcaatcccgagcaatagctaaagatggtggttcaaaaagttcttcttcattcctgaaggcagctacaacaactgttcatcatgcaattaatgaatctgagaaagcttcttatgttgcacatattaacaactacttggctgaagataaattcatgagtcagtttcttccaattgatccatcaacaaatgcattgtttgatcttgcaaaagatggagtccttctttggtagatgttcaggactcaatatcagctaattaaaaaatattgtctcccctttttcctccctgactttgttgtttattttattgctgcagcaagcttattaatattgctgttcctgggaccatagatgatcgagctattaacacaaaaaaggttcttaatccatgggaaaggaatgagaaccatacccttggcctcaattcggccaaggctattgggtgcacggtggttaatattggtacacaggatttaattgaaggaagagtaggttcaatccttgtttttcccctctccatgtttccagtttcctttttttttttatttgaccgactttgactcatttttgaaaattttcctgtttggttatttgtagccccatctggtacttggtttgatttcgcaagtaatcaaggtaaactacggaaacttcccccccttttcttgcttaatatggaactcagatgaggaagttgacaccattttcattggtaagacatgtaaacttttgctgtcttttttgtttgtttaactttttattatggtggcaacattagattcaattgttagctgatctcaatctgaagaaaactcctcaacttgtggaattagtggaagatgacaaggtgatattggataatattattcctcttatttgtaatttacatgtacaatggttttctttcctttacatatgtcagaaacgtgattgaaataaacctctatattatatttaacatgctggcaggatgtggaggagcttatcagtttagcacctgataagctcttactgaaatggatgaatttccacttgaagaaagctggatatgagaaacaagttacaaacttctcttctgacctaaaggtgagggaaattcttactaactttgtatgctgacttactctaatagaaataattctggacatggatgaaatattatccagtattccttattaacaaccttttattatacacaccactgccttgatttttgtgccttttaaatcagtaaagaaactgtggatcttcgtgttatattctgctggccttgacaaccatctacaagtttcaaaggaaaagattcactatatttccctacatcatgccaattgctgaatcattgtgtattcgaatccctccactaacaaaaaggttggttgggtggtaaaaggaaaagaagggaaggaagggaaggagggagaggtcgtgggttcgaatccctccactaacaaaaaaactaacatttaacaactaacattggccgatcaaaaaaaaaataagttgtgtggctagttttttatgtgcatggcatttgttaagagatatagtataattctaagttgcatgagtctattatatctacaataatcttcttttcgcaggatggagaggcttatgcttacttgcttaatgctcttgccccagaagtggcaggtccatctgccctaaccacaagtgatccaacagaaagggcaaacatggttcttgagcaggcagagaaattagattgcaagagataccttactccaaaggacatagtggaggggtcacctaatcttaatcttgcatttgttgctcaaattttccagcataggtatggttctttttaaggggttgcaaatgtgctaattatttcattgtaaattcatacaatataacaataagaatcttttgggatatgcttccaagaacccatgctgttttctgcccttctatgaatttggataggtgtggctcctatatcatataacattgccacttaagcttatgcattttatttgttatgattatccttaaataggcctctgagtaataactaataagtaatggatctcactggtttgattcatttgttaggtacaagtaagtagggttagtgaaagttattaagttagaaatgtatacagtacagggtggatcttgagctgatttagattgtgagtttcatttatatttatccaaaaatctctgttacttgtacttttgtaggaatggccttacaacagttgacagccagaaaatgtcctttgctgagatgatgactgatgatgcagagacatctcgggaagaacgatgctttagactatggattaacagtcttggaattgccacttatgtcaataatgtttttgaggatgtcagaaatgggtaagttttccactgttcagttggctcatcatctgtgtcttccattttcttatcatttttgtttttaagttacatcttcttttgaaattttccttgatcttaactactggttatgattttcctttaccgcagatgggttctattagaagttcttgacaaggtttcacctggatctgtcaattggaagctggccacaaagcctcctataaagatgccatttcggaaagttgagaactgcaaccaagttataaagattgggaaggaactaaacttttcattagtgaatgttgctggtaatgatattgtacaagggaataagaagctcttattgggtgagtttcattttttccctgctttgtgatgatttgttagtgctagaaatttgttatgattgtgtggttggtaccctctcatttaacatctgctttaaattctgttttgtcctcattcattggatattttgatgggtcaacacattattttatgcttctacactatagttaaatctgccatctgaagataatcaatagccaggatatgttcttgagatttattaccgaggaatatcagaatattctctgtggtgcatattcatgttatacaaatcaagatatataatatatgtggtacaaaacataaagctctaacccttatttataataatacaatgactggatgctactgaggattagtctcatggctttcgactatagagataccttgctttcagcaaaaaaaaaatagtaatacaatgatcatggtcctaattaaacaaggaaacaaatcttgaaatataaggaaatagggaaatgttgagaattgagataatctaagactctaaattactcagatatacagtgaaaataggtttttaaatatgtttttagttcaatatttttgcaagtttttttttggtcccaataatacaaattttcatatttctttggtcccccaatgttccaaactgatgacatttggtcctcgacatcaattggggtctgttaaatgttgattgatatatttgtctcgtgtggctatagaagatgcatcatcagttttattgtgccacgcctctccatcccaccctcttgcccttcgcatgtgaactttgaacaaatccctcacttgtcaatgtatgaaaaacagtcctcttaaagaaatcttcacaacaatggcctcctttttttactgtatggaatgcagttccaacctaagtcttaactccaccaaacttctacttcgaggtcagcaagaagggtgccatttcattttttgtggtggacgccaccaatttcaagttcgaaaaggaggacaagatctgaactttcttcaagactgtctcagtgtctctcctttctccccaccccaataggaagatcgattatcttatcagattgataggattcaacatttatttctgatccttcaatgaacgaaatagttgaaaaaaaattggaagatgaagtgtaaaatatggaggatgggcagttggataaaataaagccatgtggcaacacaatggatattggataaaataaagccatgtggcagttatggcttggctcactgttagccacatcatcttgatagttgattcacttaagttggggactaaaactacacactctagaataatgagggaccaacacatcaacatcaacatcaacatcaacaacacctttaacccaagttaattagggttggtggtagatgaatgagggaccaacacgatagaaaaaaaattatgactaaaagcaaaaacatatattattggatatttctcttatattctaacatttttatttgtcattattttgttaaaaatatgccccattatatgtaggaaatattcatctctgttttttctctgtcctcagcatttttgtggcagctgatgaggtttactatgcttcaacttctgagaaatttgagatcgcactcacaaggtaaagagattactgatgctgatattctaaactgggcaaacaataaagtgaaaagagcaggaagaacttctcaaatggatagtttcaaggtatcaaaccacctattgagagttgtgtgtgtgtgcgtgtgtgcttatatagttcttgctactcttaattttacatttatttataacagttatcagtcttaaatatttgtactgctcatattgggagaaaaatcacaggcatctgttatcaatagtactaaaagtaattttatttaggcttttgaatgaagaaaaggacttttcagtgttcatgatgattgctttgatgttggactacaactcattgttgatatttatgtattgtgcttcatcaggataagaatctttctggtggcgttttcttccttgagcttttgagtgcagtggagccaagggttgtcaactggagtcttgttactaaaggggagactggtatgtcaactctgtcattctattgagaaattgtgctggctagaattctgcttgcaactctttaatttcacattacgcattattatatttgacaattgacattaatatgatgagaatatgttatcttatgagcaacaattgaaatggtcaaatttatgtcatatgaattgcagatgaggataagaagttgaatgcaacatacataatcagtgttgcccgaaaactagggtgttccattttcctgttacctgaggacataattgaggtatgtttgtcgatgttaaacataattttgttggtaattatgccaattgtctatgaaaaggggagtatggacttaattggttgaagtttgtttccaatagatatgcttttataggattagaaattgatgatgtttctgaaatcttaaaattggaatggtacgttttaacaattgatctggtggatataacggagagtttgtcatttattaaacataaataatgtacatggaaaagcatttttcttctattatctaaatatatttgttcattgagcttcctgcccacatacttcactaatcttgcatttatttggctgagaaattttgtgtgactctaagcttattatgcatttaaccttaacaggtcaaccagaagatgatactcattttaactgctagcatcatgtattggagcctgaagaaacctgaagaaaacatcacccctgaagcatcgcctaaagcttcagtagatggtgaaagcgatacagatgtagttgacgaggtatccaatttagcaattgatgatacaacttcggagaatgctagctcttctttaagttagtaaggttgaagcaaaccatactcaatggagaatgagcgggggaaaacacatttttgtttatagggcaaaaggaagatgtcaacctcttggttcccagttcgaaagaaagcttattgttatgagaaaccacagataatagaaggatcttgtaaattctttagaatttttttgtacttaggcatattctttgatgaaaattgcatgcaaaatttcccaataataatgtgggaggaagacatcgttttattttccgtctgattgttaagattattcttaatgcgtgcatacagatacgggttgaagtataatacatgtagttgatgctatggcaattggagatcttcatgccaacttttttgttttcctcgaaatgcagatttattcttggtttcttttcttaacttggttgtcagtatagccagcagaatagtaaaattatacatccactcgcataaaacaacgcaacaacaatagcaaagcattttcttgctagttggagttaactatgtagcgtaatgttttgttaatcatgtttataaacaaattattgaccacatctttgaattgttttattttatcatttttcttgatctcatctttagtgattcgactatccttcatttgatttactttcctcattagaacttttacaagtcttattcacacattcaaataattaaggcaagtttctagtgttctttatgtaataagtgctatcccgactttttattgcctaaaattgacctgtgtattacaatttctttcgggtaacacctttttattaaagataacatctcaagtagttattcatttcatccatttcacttaaatcatttgattgacatctcctatataatatgtttttggatatttttaaaatcacagtgattatctcaaaactacctgaaaacaagatttttccaaagcaacaatttgttgcttcatatttatagtcaaatcaaaattgattttgattcatcttacaaccattccaaacacactgttgatgagaaatgttgacacatgtcgaacaagtatcatataggaaaaaagtctttaaacatccaaaatcaattgacagtttgagagaaatagagagaagaaagagaaatattgatatcataaataatataatatgataagaagagagagataagaaaaattaatgttattaataaggtgtttaatatttaaaaatataaaaattcaaataagtcaaaagagttgtacttgcttcatatatctgtaacagtaattatctaatattattataaaaatacaaatattttacccttttgttgatctttgcaactttcttcgtccgtcattattgagcagaagtactgaaccgatgtagatggttggtccaaacacatcaacatacaaattcacgtttcaagaactgataacaaaataattggaaactcacgtataaacaaaaaaataacaaattaacatatatatatatatatatatatatatatatatatatatatatatatatagcaaactacactcagaaattaatgtcatcatctaaactcatttcatatcattgtaatcaacgttgtcgttagatgaaaagtagtaattaagtccactatatgattttttttttattattattatgatcatgctagtgaatattttaaatatattggttaagaaattaatgaataaaaaggttttattagaaatcataatattaatatgttggtaatattaaatattataatttttttaataaaagattcatttttcattctttaaccagagcattattgaagtaggtttttttttttttttgttattgaaacttgaaatactggttagcattacttgttatgataattaagacaagaatttaaaaaatcatagcatctttgaagtaggcaatttgattgccccaaagtaaaaaaaaaaaaaaaaaaaaaaaaaaaaaaaaaaaaagaaagaaaaaagagaggggggtgcgggggaggaattgcaccagaacatgagtacatgactagtgaaagaaggacgcaatggcaccgccttgaaatccagctcagctgtcatgacgcgttaaacagcaaaataaaagttaaaacataattttaaaaactctaatacacaattcaaatttcaagatacaaaagaagaaagaattattagttaaaattattatcattgacctttgcgctggtttggttgggggattaggcttacaccaagctgtaactttggctagatagcaattctattaatatcaacaatataaatagaattacaactaacaatgccacaaatttttaagctatatatgttgaaaataaatactaggaataaatatagtgatatataaataggtcatcacttccaagttttgtggctgttatgcaataaaccaaaaccaaaactgactcatgctttgatattggccagtgactctagcagggttttgctcatcccaagcttcaatccaactaaaaatttattagttaaaaattatcagtcaaaaatactttgaaattagttattccgcctcaccgcttacaactcatgaacccatcacaacattttcaattttccttccatgctcaaccaaccatacaccacgtgatcgcatttattcatacacaccgtaatacgtcattttgatatttcattaatttcctattcagccttggtaaagcaatagcgatttgatattcgttatgatcttcttcttgtcattgaacttaccaaatggcaaatgcaaatgattcctgtgtaagaaaatgcatttaagttgatgtttccctttcatctttaaccaaacattccaattaaactaatcccttgaatcaagaatacctattgaataaagcacctaagtggcgacttgcaaccaaccaattaccaatattaagtccattatccattagttgatgtttcaaaattttacaagcacttggcattcttaattttaataattaaacaattaaaattatgagttttgccagaacttcaaaaattcatggtccaaaggcactaagcaagagaatgtaattgaacaggctaaaaatgagttgggcattgaagtaccacagcagtgaattttgatgttgatacacattataacattaaattaataagtttatgatgtgtccatatccaaatttacactttatgacctacaaacatcctgccccgagggagataagaatttaaggtaatgcataaattctgcattctgctcgaggcagcagaggacgacatttagagagagcaacgtaccaccccccccaccaccaaaaaaaaaaaaagtaaaaaaaaggacaaaagagcaaaatgctatttgtcctccattctaagggaatttagccgtctgatcctctgatccagctccttcatcacttcaggctcttgcttcttcctttgctttgatatggtatttgttgtcatggaacctatcttatcaaatgccacctgcaaacataaggaaagtttaattcaacaaatgcatcaaaacttcttgtgacaacatggaaaggatgatagtgcaaatgacaaagatatgaaatagtgaaagttgtcttactgtcaatagatcatctggatcaaataggtgatgagtggtaatctgcagaatattgattacttcgccaacgtgatgggttataactaattcatcttccttcatctgcaattggggcgacaattgttgaaacatcccttccaatgtagcaaactctttctatattttgtgtgtttatcaaaaaacaagaaagatcaaaaaggctacactagtggtaccttaaagattgccaaggccacgttaaatataaccttagcaccctcatagaagataacatcccacacgcgaagagttgtctgattcatggaagaagtattagtatgtggaacaatttagcttttcaatgaataatttattccagcactactctaacctcagaaggcaggcttttcgaaaagaggcaaaggaaccactcagtggtaacaagggaaacatcaaattccaaagcttccaaatgagtagcaatcctgaatttccatttctacaattttcagaagatactaagaaacaaacatatgatacacagttaacacatcaaataaaattaccttggacactttttagcaagtaaatctttaaacactctttgttccacgtggcatccagacaaattgtttgtgtaacagtcgttaaccaggacgttttccaacaagacagcaagcatccaaaatgcatcttcttctgtcttcatgacaagcaacaacaatgctgcaacgtaatttaatccctggagcaatattatagtagagtcaatatttaagaaaatatgttcccaagtatgcatttaattttttttaattttcaagtaaaacacatattattgtcaaactttgtggcgctatattttacctgccttaaaaaatttaaaacatcaaatatagtggctgaagcaattgagaaaaacaaaatgtaggtacaacataaaaactaatccccgctttagtcacaccatgttgttaattagttagaaaggaagcattcagaggcctgcatgttactaatagaagacagaatatctaattgcagaagaaaaagaatagaagcagagttgattgaatcaaagagtaagccacatcgtctcaaaaaaaagacacaagatatttcccttcaaatacctaatacctaatacctaatacaagacataggtagtatcaaatttcaatttaataacaaatcagaacattgtctttcatgtactgagcagggagtcaaaactacaaatgaaaggccagagcaaacccacctgacaatacccaacatcagaatcacggaaagaataggcaacaagaacacgcctgagagcagcatgtccctcgggagtgtccagccatgggtgaccagggaaggttctgggtagatcctgcaaaaatgcttatagaatgattagaagcaaaataaatatatataatgaacaatgtaacatgtagacaagttcaaattattctcgaacaaaaataaaaaaccaatcaccattttaaggatcacatcaaacaccctgatgtcaaaccgtatcaaataccaccccaatttacaatttctttctaatcagcatttactcaaagattcgttttgcctaacctaaattccatgcaatcaagaacaaataaattatttaaatgggatacgttaatatggctaacagaacttatgattgtaaaggttacaaacacagggataaaaaatgcttcaactcttagatcttccttaactctccgaatcattcataaataataagtattgctcattggaagaaaaacaaaaaaaaaaaacacccacaatcatccatcaaaatctgcagcaaaattttgtctgaaaatcttttcacaggtcacacaatgtaaagtctagacaaagtaattcctgcatcaaattcatttgaaaatgatccacacacctgcaagcactagtcaaataaagggtgatgcccacaaccacaattatgaaaattgtaatcaaattcaaaagcaaacccaatgtgtgatgatcatgaaaaaaaaagggggtgagttgctcacatgatctatctgccgggtagcaggggtgaccttcccgtccactgctttggtcaaatcatcataataactgtcaggcacggtggactttttcttggctgcccctgacaaggaaaaccaaatcttaggcctaagaactgggggtatccccttccttatcaacttcttcaaagttattgcattagccagtgctgagaatttcaatgaagatgtgagggcactgccttgccctatggttgtgtgcaaataccaatttgcccctttgctggcctccaatgcccaccaaacccttccctgttgcctcaccttctcccttacctcattcaacacattcacatcatccacattcccttccactgtgaacccataaaggtcttggaatttcacagtcagatttgctcttctggaatggatactgggcctcaaaactgcaacttgggattggtattcaaaggcaaggtctattttgcttttggttccatacattttttcttgtgtcagatcaagaacgaatggaagatagccacaacgaaagggggtttggcgtggcttcggttttcagacaaggttgtcttttgaattggaaaaggaaagaccttgtcaaataagaaaacttacccactagtctgaaaccgtgaaatggtccattttgtggacctgggtgcttgagattaggtgaggagaggctgcaaacaaaatgggtgaaacaagatttggtgaaacaagggttggattcaaaacatataacaaaaggggaattttttttaaagaccctttacgaatccccaggaagcttgagactttgatgtattaagctcaaaaaatctcttctgtgagtctaatgaaaacaattaataaatgtgaaatgggggagggaggggtagggggttgaatattcaggtacagagagataatatgagacccaggaaaacaaaagtgccaagaaaatggggaaaaaagaaaaagaaaacaggaaaattacagatccttcaagatggatgtaaaatacagagaggaatgatgaggaaaagtgaagtcctgaaatgggtaataagagtgttctaacaaaagaatggactagaaagagagggacaagaataaaacccagaaatttagggggcaattttgcatggaaagagtgtaaaaacagaacggagaaataggctgatctgagctggtgggtggctttcgctttgctacatacactcggctttttatgtggtttgatttttcggggactcgtttaaatttcacctttttcatatattaaaaaattaaaagaattagaacgttaaagaagatattcatgatgtttattaagttcatgactgtctagtcaatcaattaaactgcataattgattattttgtttaatatgttaaatgacttaaatgtactttttacatttctactttttaagataatgtcttattcttgaaacttctattttgcataattgcatattctattatttatatcaatatttattaaataattaaaaattaaacatataactctgcataaatattaagagtagctcaattagttgattaagatatgtaaattattgtaatttttctcatacctatctttaattcttacatatttaaaaaaatttaagtaatgatagtttataattagatgatcttataaacaaaattacattatttatacatatattatttattcaaaagataaatattcttataaattaaaaaattaaaaaattaaaagaatttaaagtgaaattctatacaaagcatcattcacaaaaatatcgccaacaataaaaataataggtgcttgtttttacacaaaaatgacaagtattttatagatgttacttcacctgtcttattaaaattgtcatataaaaagaatattaaaataataattattttaatttttaatataatatttattatatatttttcatttatatatggacaacaaaaaaaaaaagattattttataaaattattaaacaatactctgtcttgttaaacaatacttgaatatcaaataattgtttaataagccaacaattaattatagagatgttttcttttatttgatattcaagtaacaattattaatttttaactatggttttttaaaatcaaaataacaaaaagaaatttgatgatccgttcagatgatatacaagccttgcacaagcgtaaaaaactaattttgtgcaatgtttatttaggcattaatgtaatcattaaatctaaatcgacagatgtaaataagaaaattcatatcttaaattcatgttttaaatttaatttattataatagaatttgagctattaattttttttattttaacgattctgatttgttaactgcacgttatgcataaaaatgaaccagaaaattcagatgccacaatttcacaaagaaaatgattgttttgattattctattcatcaacaaccttttcatgcaccgtctcatttcaaattggaaaaaaaaaagtgttttactctcaatagcttatatataaaaataaataaaataaaataaaataaaaacgtgctggtatagtggtactaagttatagcatattagaagaagaagaaaaaaaaaaaaaaaaaaaatatatatatatatatatagcatgattagaagggaaaaaaaatatatagcatgattagaagcaaaaagaaagatatagcatgatttataaatgaaatgtaagtaaatgccattactgtacacgatgttgaaaatagttaaaaatatttcatttgtaggtatacatgtaaatgtcgataaggatattttaattatacaatttatgatgagatttagtatttttatagtgatgtaatttttttgtacagtggtgatgtgatgtaagtgtatatttgtgaatataatgtttttaaagtatagtaaagatttatgtaaaaatatatatatagtgcagaattatagattatatttagtcatgacaaataaattggtatctgtgggtatcatcctattctcgttctgagtttgccagagaatctttgtgggatggatacagatgtaggtaatatttgatttttgaaaaacgataatgaatatgtaatatcccgtattcatattgtgtgataaattatttcatttatgtaaaatatatattacttaattaacatttgttatcgtttgtctttgtaattaatatgtcattctaagatttttattacaataattaataggtgatgattgattcttaaattcatttagtaataggaatagaaatttgagatcatatatatatatatatatatatatatatatatataataaagtaataaaaaaattattggatatacgggtgacactattttatagaaaatgttattattttttctttcttaaattattttttatgttttttattttatttttaaaattctagggcgaatataaataaggaacaaatatattcaatagtcgatgagaacattaaataaaaaatcatctctattgaaaatagaggttgggatggattttgggagacgaaaacaagaaaccatatacattctaatttcattttgttatcatgtctaattatattgtatatattttttaaatcacatatatattttttagagtttcatacccatttttattttattttaatgcataagactcactctgtataataataaattttaggaaagtttgaagaagaatctgtaagaggtgttttcaatgtcatcaatatcaatagacttacgttatattgcaaaaggtgttttgaatgtcatgaatatccttgttagattgtgtagattatttgttactcaccatgttttttttttattcctccatgtgttgaattttcagttacgaataaaatagatactcttcttaaaaattagacttgacattataacaaaaataagtaataacaatatttctcttgttctagagtatgtttggtgagtatttttacttaatttttaacttttttatattagagacaaaagtatatttgataaacattttttttagtattttgtaatattttttttttagatattaacttctagcttataatttattttattttattcttaaaatatttattaactttctcctttacttacattggataaaattttattatttctttgtgctatttttattttttggatatttttacattatatattttatttcaatcattatattatttattttattattttagcactgtacttcaagatattcgtaatcaattagtatgagaatactaataagtgatgatatttaaaagaatgcagtactattattttttattggtgaatgcttattttattgaaaatattagtgaaagaatttgaatgtactatctctctttcctctattttcttttcatttttcttcaactattggatcaattttatacctccactcagtagtattatcatagtaatcaacagaataaatgtataaggtctaattaagtatttattttttattttaaatttggttaaaaatatttaagatataatataaaaattaataatagaatccatagcatgaaaaaatatgataaattttttattatgcgcatatgagcaccaatcaccaggacttttaaactcatactcaatttttaagacgaagtgaaagtttaataataacaattttgagttaagcgtaaagaaaaatttcccaaaattacttgtcttaactactgcatcaatataaaattttccaaacacgcattgggttgttcaaatgaaagttaagtaaacacatatcctaatagttttgacatgaaattttcatcataatttttgttgtgatataatctctctagttacttatgtattttttctgtaaaaagtacttattatagaattctctttatatatatatataataaaattcattatttcattttaatttattattcaaatattaataaacatgggagattaataattaatttaaagttttcatgagagtaacatttgactttaaaaataaccgatgaacttgtccgcaattagttttacaaagtcaaaatcaagagcaagaaggaatagttcaaatcttcagaatcaaggatggtagtctccgattgcccataacgtgcaagcagagtgttaagaaaattttccaatatttaaatatagttacataataagtcgtgtcaaagacttcatgctgatagtcaaataagaaaaataataaaattattttcaccgatatagcaaaacacgattttaagaatccccaacataagcaaaaatacttttttttttcaataataaactgacataattgtgtaatctacttatgttattgaatgtatatatattttatttcatatagcaataaatactttttattaaagaatgtagcaataaacattaaaaagtattttactcttatattatacttctttacggctttacggtttaattttatgaactgtaaatcaaatctgaaacagaatattattacttatattaattttatttgatttaagagaattatttttttataaaatatatattatatattagtatgtgcaaaaaaagaaatgataaaattaaattaaattctcatttcacctcatgatgatttttttggcaaaaagaaatatttaaaaaaaataaaaattcccgtatatttctcagattttatttctttcttaaaccatactaattagttgttggttaattactaaaagtaaagtgaaatatagaaaaggagaaaggtgaggacccgttgttttgttgacatatatttttgcactcatgtgacccacaaaatgattgtttggatttgagcaaaactgtaataatgtggggcttgtttggtaggctcgtcatttcactagcgccaaacggaagaaatcacgtgtggcgtttgtgatatggataagcctctgcaaaagtttcaactttcaaccaacctgtttcattatcataatgcttttttttatcggatccaattctatttacatcaccatgtaaagataattatgatgccagacggagaattcgattgattatatgtaacatattttatataaacaaaaataaaattatttaatttgactaatcttaagttaaaaattaaattatttttattaacatttattataacaaataatacagaatcatagaaaatagaattataattagaatttaatgaaatattattttaataataataacattaaatataaaaaatagttaaatttatttatatttaagtccaatatacgaaattacttttttttatatatgaatttagaagaaatattactcaaaatattttttctctcttgaataattgctatgatttgttagtttgttttacttatatttagatgataatataaaaatcctataaatcaaaattaaacttataaatattatctaaaaagtacatatcactgacttctaatgcactttagttaattttttggtgggggaaattaacagttatttaaaactgaatgctgtagttatgttgccattaatactgtttaaacaaaagaagaagaagaaaaaggctattaatcgttttattggtccagtcaatatgaataatttgggggggttaatttgtttattaagaaacgaggcattagatattgcctcagcggttgttcttgtggcatgggccggcttcgtttctacattgggctggaccggccggttgatgtcgacgtgggtcccaaattcttctggaatcgacaaatttaagccgttcttcatcggtccgtcactatttcatttcatccatataacttttaaatatatttataaaatatactattatatatatatatatatgtatatatatatataacagtatacgattaattagcatgaatcaattctccttttttttaaaaaaaaatcatgaatcaatcaattcatgtaggattatttcaatctaagaattcaaattcgatttttaaagatataatttgtaaacaatagttataaattttggtccaacaattatatataaatgaatggtcaatgattaaaagttattttttattttctgaataaacgaaaagttagtttgtgatcccgtgattattttaaaaaaatcatgtacatttttcttaaaatcttgattatttaaatacagtctaatagtctatatttataaggacaaaacttataaacaggttttgtttttatagttatctaacctaacaagtgtattaattagccggaaaaaaaaacaagtgtattaatttgtccacgcaaactaaaagacttcacgaagctaacctttaagtttttaacaccgtaagtgccattgattattcacacacagacacactgatcattcattgagtggagaaattaattttaaataggttaaaaaattcaaactaaaaattaagaattttcaaacaacttttactttgttaatttaaacccttattttaagcttttacattaaaagcgcttattttgtgaaggataaattgggagaagaggggcagatacaaattactagttggattgttttgtaaaaaaaaagttaaataaaaaatgattttaaaaattatgaaattcaatgtactatttatctcctattcctattaatctctctttctctttttctcatctctttcctatttcctttttactaaatatcttttatttatcacctatttcagagaggacataaacaaggatgaatccataaacttgttaaaggagttgattttttcccctttatttgaaattgtttaaatatctaacttttaataagtaataatatgtcaaatttttttttactattttcacaaatgaaattagaactaatttttattttaaataataaccaccttaaccattatcataaaaataacaaacagataattaattttacataattttactctagttatcaccttaaacattacaatgataataataaacacaactaattttacatgattttacactaactaatcttaattgttattatacaattttatattaactaacttaaaaatatatatctatatatataagaagtgtcaaaggagggagggagtctaccttgctggcccctctttgcattcatccttggacgtaaagtagcttcattagtgatttttaattcttcttttgagtatgtaattattttaaatagtagtacttgtaaataaaaatttgttatctatgataaattttatcccataaaacatacctatagtttataccaaaaactttaaaaaagttggacttaacgcaaccttaaaatgagatacctccaatatctataaaaattataagattatttctctcaatcttatttcgtacaaacaaacattattttgatatttgttaactctgaacttataaaagattctcatgtattaatttgttagattaatattttgctatcgtgggaatattaaatcgtggaaataacaaaacatgttatagaaaaggaataaataaataaaaggaaacaataagtgcacatcacactgatgagaccaacctacttcctttggtacaaagataaagaccattcacgtggtatgtcattattatgatatttttatttaaggaaaaactcgctatgaaagtggtctcgtgcaaggcttataaaaaaagctacgaggaagagaaaattaaaaataaagaacgttgtatatttcacaatttcaccaatttattcctaaagaaaaaaaaaaaactccacccaagtttattagaatgaatatcaagttgatctatgaaatgaatgtgtatcatttaattgatgtctatcgtcaaagaccggtgaattggcttactaaagtaaaaaaagttaaaccaatctagttaataatactgacaacatttttaaagcgggtgattaaatgagttgattaaagttacatattgttgtttaataaaaaaatttattggagatgatgatttgataatgtgttgtttaaaagagttacttatacaattaattgattattactaaaaaaaaataacgtttttttcaatccaaaatttaatgtaactaaaaaatttagttatcgtagtaactttagtattaaagtaattttttgtgtaaaatttttaaatttacgtgatattataaatcttataaatttaagatggataaacaatttatttaaacaatcatatatataataaattctttaagaaataatctaatcaatatcattaattacatagaccaaattaattgactattacttaaatacaagaatatcttacttttgatttttattttttttataatataaagtatcaattaacaaataatacaaattaaaaagaactaaattaatacttactcttataatatccaaatactgcattgttaaagcaaaggttatgaataaagtttccctttagacttttttctcggatcttagatcctttacttgtacactagttatctagtaaggcttaataatattaacaatttctacaacaagaacaatcataggaagaataggaagaaaagtgtaaaataagataaaatgatgtgataatgagtgatagagaaaaaatgtataaaagttaaagtattgtgaaaatatagtgaaaataatattattcagatcatatgactttggatgtggtggttatatagtatgtttggtgatctgtccaatgatatttggacgtagatccatgaaataacttttatttgtttttaggttgctttagagtgaatttggattaaacgtggatcacaaaagctaaaacaatcacgtacatgtacatagtatgattgttatttattaaaattttatttcatattagatttaatttataggttaaatgtaactcaattacgatgtactaattaaattatcgttcaggttattttttaaaataataaaacagaaatttcatataattatttaactaaaaattatatttttgtattttggttttgtaattgtcacgaaataaataaaataaaataaattacaataaaattaaatgacaataaaataattaagtaaaaatataaatattagactttgatggtgacattgatcctgatgaatgaatatctaagtttggacttgaaatttattcgatccaccgtaatttcacaattttctagtaatctctcatgttcatccccggttcactaacgtattctacccagctcttgaatggtcacatattctaaactacttgcccaatactcaatcccttagacatatggatacaaacaatcaacatcaatggtcgagaattagcgagatttaatccagattattctatccctcgagataatcttaattaagtacttaattcataatcgagtttcaaccagactcgttaaagcgcaagtcaattcttgaatttatttataagatgaccaatcaaataaaaacattaagtatgaaaacaaataaaaaaacttaagatgaagtgttgaattgataaaattaaagtgaaacaagattcatcatttcctttcctagatggaagaaattgcactcataaaaataatacaatgaaatctaaagtgtctaatagaataatgaatgtgtctagtaggtgtaagtctaaaatataattctaaaaactgttcgggactttactattttacaatggatactttaaccttctatttatagaattgtaattaggtttaataaggaaaagaattacaaaaaattacaaacaaataatatctctaattatttcaagtaattatcttattcttcatctgatttatcattgaaaaatatcttacttttgattttcctagttttatctttattcttcacaatttctccttacataattttctactgattttgaacctctggaactcttgtcagaattacccattattttgctgaaaaatataaaaaaatttattaaaaataactaaaacataaaattcttcctaagacaaaataaaaactgaatttaaaacaaagtctaaagttaactaaaatgtcaaataaatatcacaatatatatatatatatatatatatatatataaattcaataaattttacatttatcattatcaccattaattttatttcgattatgctattcctttttgtcatttatagcttgtttttcaaccaatggtggatctgaaggctacattgctgtgtacaacactacaacgtactcgaagtagctcacgagagaaataaataaaaatcattgtaaaacatgctacacttttcatagccacccaaatatgtgctacactagtatcattactattactgaaatagtgaaatttctatttcgttcgtaagtgaaatgtgacgtataaagtccttcaccaaaaacataaaataaagtcaaacacaattttttgatattgatttacacaatactaatgggactgaagcaggtaatttatattaaataataataataataatattacttgcctacctggtatgtttggtaaacaaaaatagctggcatgaaatgattcagtgaaacagtttgacgttaatccattgcatattcccaaaattttctttttaatcagtaggaatcgatgctcataccaaaaggtgaacaaattgcttgtatttcaaaatcaaaattaacgcatatctgctaatatttattgacatttgacagtgttgcaccctagggcccagcatatgttcaaagccaaggcccaaggaataacgaaatatcaagtgagttgtaattattctccaaaattgagcccattgttggtcttatttattcgatatctttattttttatgtttctgtttatattgaccaaaaacacgctttctttttagaataatgatatataatttggttgttctgtttatatatttgttcggatactggatacattatgtgtgattttggtgtttgaacttgttttaagcaatttttttttaaaataaagtaaatcaagttaaaactttttaatcattatttggggtgtgaaataaatttaagaatttggaacctaaaagctaaaatttgattaaattctctctctctctctctctctctctctcacacacacacacactatatatatatatatatctatagattagattttaagtagaaaatacattttatgtagatttatgttggtagaaaattgtgctaccatactggtatgattctaaacatttatcaaatgaaacaatttatttggtttgaacaccaaaacatttgttttcttgttcttctaaaagaggaagcaacccgcctgctgtggcggggcagctttttttttttcacaataagacctggacgattttaaagatttgaatataaacaaattgtaattagatacactgtcgttaatatgggtattaagtcaagggatagtaaaattaaaaagggtaaaaatcaaactataaaaagtttttatatctcaatgaaattgaaaacaagagtacatttgaactattaagaaaatgttagataggataatcatgagaatttcatttaccaacaatggtgtctcctttagactttatgacgtatggagaaaagttgaaaccaagtgtttgtacgagacaatttctaaatatgtggcagtggtagaacaacattgaggaagcagttatgggagtgaatcagaagcagcaggtaagtgtagaggatgaagaagccttgttgttttgcaatggaagagcaggtccttatatgagttttttaaagttatttactcatctttttgtggtcctacattgtcatgtcacttataaaagctctaatcaaattttgttccaatgcaaaaaattacaataaactccaaaaaatcctcttgattggtgatgtttgaaaagtaagaaactctagaaagagtttcttatattagaaacccaaatttttttaaaggaactctcaggccacctaaatactctctcataaataattacttctaaaaaataattttttatccttagaaattcactaaacatctcccattagagatggcgggtgcaaagaagaatgaagtgttcgataaataatttgcaccacacgcaatgcataccctcgctggcgcgccagcggccacaccctttaatgttggcaaggataagtacgttagcaaaatgtggaaggggttgaaaaaaacggccttatgttgtcaattgatgttgatcgatcattttcagtgtcatagatttaggtagacagcaaagtagtacttaatttcaagtgcatacgatagtctcaggtttactactagtagttacatcttaattcattcacgactttggagggcacacctattgccttacgaaatcattaattgcaactaactcagttaagctaaatggccataacagcagcaaatagcttaattgcaatatcccagatttagatagacttccaagtgcatacgatattcactggttttggtgttggaaaatatttttcattatgatatatggagtttgagatttgttgttttaaactatcaagatttggtgttggaaaatatttgtgctttaagatttattgttatgtttgttattagtttgttaggtgtgatatttggaccgcatattggtgattttttcttcttatatataactttctcttacaaaaaataagaagaagaaaaaaattcagacgcacacagttacatcaaaataccatttgcttatttctcatttttattaaattatattatattattacaattatatgttttggagtccaatgttctttggttcaagatcatttcgttgcactccattgaattaatggattgtcgtatcttcaaagaggagtgcatgcatattaatttattataccaatgcagtggagacgtttactctctaaagacagcgcatagcgcgcttcaagtcagatatttttctagactctcctttgttaaattttttttgtattaagtattattataaaaattgtctgtgtattacaaacattttttctcgttgtatatatgcagcatcaaaattcttccttatcactcagtttctatcatcaatatgttgttatagtattccatgaatatattttcttttaacacttcaaaatagtagaattaaaaaaaattgtatgtctataattgcttgattttgatcaaaggcttttaaccgtgagacatgtatgtatttacattggtagtttgtgtaccaggacttaaattattgaatccttcatgacataatatcattatttatcataatgaaatctttcgtgtcttgtgtttcataatcatatatatgtttttgataatgtgatattgctttaagttgatttgaagtttgatagattttaattggttcaaaaatatcctccaattcaatagatggtgctatctatgatttagttttttgagatttaactgtaagtattgagtttatattgcttgacaataaaaactaccaaattacaataaaattgaatttttgggctttgtatgacgtgaactatttttatttgattaatcatgttaacaaattatggcgttgagttattaagttaaaatattgtatattcttttctttgattacggttatggcttgatcctctgctcaagttttataggctatcatcatttgcatagatgttttagccatgcctaattttgttagtgattattaccagtgtgaaatgatgcagtaatttagtttcaacttgttattactttttatccatcttattatgtttgaatttacaatttgggaaacatgagttcatcttagtcttgtgttcatgaattaaagtgtatttgaatatcttaaaatatttgattatttttattgattgattaatgatcacaaaatgaaggtaatgattatccattagatgacctttagtttaatacgttatgatgatatcaagattgtgaaatgagtacttatccatttggttttataaggacaattcttattgtcatttttttttcaatcgatttgacatttttttaatttaataatatgtttaaaaagcataataaaatttatacatcaataaagttattaccttcaattctataatcaatttatttataaacataatataatttataaattggtgagcatatcaaactgtaagttcacatgattgaaatattataattcaagttttagaaatcgatctttcaccctctcaactcgatcttgaacctctctcaggttcaatctcactttcaccctctcaactcgatcttgaatctctctcaggttcaatctcactttcatcgatctctcaccctctctcgggtttttcattgtgtttcaattcaagcagcataaaaactttaaatacttttagtacctctttatgttaattttgtactactaattttataggcaaaaatttaaaaataatattatttaattaattaattagcaaaagggggctgtttggggaatatttaggcatttggggcagccaaacacgccctgcctgggcgtgtttaaacacgccctagctaggcgtgtttaaacacgccctggcagggcgtgtttggccccccaaatgcctatatattccccttgaaaatgacatttgccatttcgcgccttctctctagaattaggtctgccttctctctagatttcgggtgctgaattgtctgaagcgaagccctgccgaaatcgtagtgctgccgacaagtaagtccatttaactgattgtgcttgatatttactttgttatatttgaaattagaaaatggttaggattatatgaacttggtagcgacatatatattaggttagttactagggttttaggtctttcaggttagttttagggtttacaatgggataagggtttagggtgtggggtagtgattagggttacgtagtttaggttagtattagggttaacatcgttagttactagggttttaggtatttcaggttagttttagggtttacaatgggataagggttgagggtgtggggtagtgattagggttacataatttaggttagtattagggttaacatcgttagttactagggttttaggtatttcaggttagttttagggtttacaatgggataagggtttagggtgtggggtagtgattagggttacgtaatttaggttagtattagggttaacatcgttagttactagggttttaggtatttcaggttagttttagggtttacaatgggataagggtttagggtgtggggtagtgattagggttacgtaatttaggttagtattagggttaacatcgttagtagggtttacattgtgataagggtttatggcttgcgaaacacacttagggtttagttatgttgttgttgttattacgatgtatgtgttgggttacagacctagggtgtatggatcccgatttaggtttaggaaattacatacacttgactaataatattgagtaattagttttccaattaaagtctttgacgttaatattttgtttgatgtggttttaaatttttgtacatgaatatattgaatagatggctgattcatcgtctacatcatcgcgatctgcatccgatcatgaggctgagcccatggatcccactgcatatgttgttccaaccccatacaagtggggcgttctgcgaaggcgtattcagcgcacacacgtttcacaagttgtgtggaacgggggaagcacacctcgagtactgaagactcgacgtggtaccgtgaaaggtggaccagatgcggactagatacccgatgttgtatctgacatgttgcgcgcagctgggtttcttcatgtcgcacgcatgcgaaatctccaggtacacaaccacgcaattatgaaatgagttaagcctgcttaatttgataattgtttaataatttttatgtatttcagatggattctgcgcttatcagtgctctggttgaacgatggagaccagagactcacaccttccacacgccgcagggtgagatgaccatcacgttggaagacgtggctggtattctaggattgcccaccgaaggtgatgcggttactggagtgacggttgacgagtgggagaccgtcattgaggaggtgtttggtcacgaacctgaggataccgagcttagaggtggatatttgcgtctgtcttactttgatagacattttgcgcactggggtgaggtggtccccgagcctgttcacatgacgcggttcacaaaggcccacattgcacgacttatcggatcatggctgctgtgcgacagatcgggaggtagcatggtcgcagcacgatatatgtcgttgcttgcaggggattttatggacatcgaccgatatagctggggctcagctgtcctttcacatttgttcagacaaatgtgtgagtgtacagatccagacaggagtgacatcggtgggtgtcatatgcttctccaggtgtgggcgtggctcagattccccccaattgctccagctattccgctgcctacacagccggactggcatttcggtcatcggtatgtgtgattatatgttgttgttgtttacaattgtaacaatgaagtgttatattatactaacattgattattttgaaatcaggtttaacgctgtaggtcgacttaaaccgcatgaactggtcgtgtataggatggcattggacttccttacccgaaacgaggtatttacaattatagtatttttcaattactgtacgtttgcatttgtggaacatgctgttaactaataaagtgttattttgttatgtgcaggtcgtatggcaaccatatggggactacgacttccttggtgcttctgagcgtgagcggctgctgtggatggcaactacgcctatcatatgcttccatacggtcgaatattgtcagtcggatcgatgcatgcggcaattcggcagggatcagccaatcccacgcgctcccaggaagctgaagggtgtgcatgacctttcgcttcgggggaaacgagaagacaattgggctcgtaaactcagaccgtttattgagcgatgggatgcgagggaccagcacattcagcttccccccttgattcaggggttgctgtcaccgcaccatgagtacatggtctggtacagagaacacgggaagcggttcatcacaaagaagggcgcgaagatggctcgtggcgtaagtttttgtttcatcatgatttgtctatttcatttaattatcgtgcatgacacacctgacatttatctggatatgtttacaacagcttgatgggctggaggcgttgtacttcgcggcaactagcccgaacagtgaggaggccttcgacttggattgggcgggtgaggagctcggtcgattaatgtctgtgttcgccgagagctgtcgcgtggaggaagcaggcccacatgctcctgaatcccagcctgaggccgatccagagatttcacttccagttcgccgacggagaaaagagggtcgtgggctagaacgtcggcggataccggtgcagcaggttcctgagcccattgtacgaccgaggccgcgcactgatggttactataggcctcctgctattgaatcgacatatagggcacaacccctatattacgaggctactgtgccgagggggcattcgggcatggactacgccgagttcagtacccaagcccagatgcatacccagggtgcagatgtagagggcgtgttcggttgtggaacgaacatgcagcccgagtggaccgaggcacaggtcgacgacatgctcgaccatatggattatagtgcagaagcctgtgctgcttggcaaccacattcaccatatggcaccgaagcttctgagtttcctatgccggtgtatgcagagcagggcacgccatgtccatctccttatgtgcatccgtatgaggcaggcccttctcagccaggaccttcacagccagccccgtcccagccaggcagttctcggcgaccacgaagacgagtacaacctgatcgacaggcacgtcatttgccgtggccaccgccgtcactctgatttattcgcagttattgttttatatttctttattatattgtagtcgactgtattttgtaaactacgtttatttgtgacatttatgttaaccatgttcggtctaactattagttgatcacgttaaccccgcaaatcataacaataacatacgccggcaaaaccattaattcataacagacacgattacaatataaaacaggcgggggaaaatgcatttttaattaaagtcataattagaaaacaacatcttcggcgtagatgtcttattccatatggatttgtggcttgctgaaaatggctaaaatttcaatcggacaaaaacgtttccagtagttggattccgctagcatccttaacacgtcttcatcgctcagcaactctcttatgtcatactggattgtggtgtctgagtattgggcatgtgccggatgacggaaaaacatttttcttaccacctgtgatatgtgaattccattaggaggaaccccaacaggcgcaacttgcttgatgacggcctttagtgtatcaatggtgcatgcagaaggaatttcaaatcggattgggtttgttccagtaaaggcataacccacaaaaccgcctcttcgtgctatgttccaacttccgttgtaatataacattgcatcgtgtgtggggacgatggttgactgaagtaggttcattatgccgtcggctgttctgtttatggtgcataatatttctataggaccagcagtggacatttgttcgtgacaccttaacattctgcaaacatcatcatcgtttgttagtgcgatagaatggaaaaaatagtgttgacctgcgactagggatggttgtcggtagtatatgttatccacgaaatggtcatcggttagtaaaagggtgtgctgaatcctacttttaagcgtctgaaacgaacactcgttaggaactcgcatggctatcggactggcaccctgaaaacaaacacccgtgtcgttgtgattcgtacatccatttggataaacgaatgctaatttggagttactaatgttttgactgcttgtttctcctaagaatgtcattgtatgcaaaatcaaatttacggggcgaggcatgttgtgtgccacggtgtagcttatatagctgtaatcgcgcctaagttgggcgtgtgtagtcacgcccttgttaggcgtgttcaaagacgtggtcggtgggcgtgtctagtcacgcctttgttaggcgccggcaaagaggtggtcggtgggcgtgttcaatcacgcccttgttaggcgtgttcaaagacgtgatcggtgggcgtcttcaatcaaaccatagtcacaacgtgcttcaaccaaggcaaaacttgaattggaaaactaattacttaatattggtgtttcatgtatatgtcattagtgaagtgtatgtaccacagcgcctaaaccctaatcgcatcataatccgtgcaccctaaaccataatctatcatccctgttaggcgtgttcagttaggtgtattcaattaacggtgaacgggtaacatatagtatcataaataaatagttaatgacaaaatgcaaattcatgtccatcacaagcaaaacattatcatcatacatgttacacaacatgtcttataaataaaatacatttaacaaagcattcataaaacacacataacaacaaaatcatgaaacaccaccaccccgagtaggacaggtcgtacgagtatgtccaacttgcttgcacagaccgcatctacgagctctctgacccgtttcaacttcgtccatctcgttacggattctggtcgaccttggacgacccttcgcacgcaacatttcgctgtcagggatgataactggatcttcactagggggaacggcaagttcatcgccaataggctgccaaggtaaagaataagcctcaaccaagttggatacgaggaacacatcatccacatattgcaaaggattccgacggatgtataaagcagcagctgcggcatggctacaagggtatttgaaggtcttaaacttcccacactgacaaaaacgttcagttaggttaactgaatatgacctgtcccagccatctgccacctcaaacgacgtatcctcaacgttatagctgcgtacatggtggcctgtagcaacgttctgattatgcctcatagcatcaaccagatttttacaatgtagttgtgattgctgcatttgtgcagtggccgtcttaccccttctcacaaagtattcaaccaatcgactgtatgtgtgcttcaccaaagcagtaataggcatgttccttgctcccttgaacaccctgttgactgattcagacaaatttgttgtcatatggccgtatcttctcccctcggcgtcatatgcacgagtccacttttccttaggaatgctgtcaatccattctgcaacctcaggactggtattgcggaatcgttcatacgctatgtcaaattcggccttacagggagtataacctgcacaattataaaggcatgaacgttagctgggtaagacatttttaaacctgactaaattacaaataattttgaacatacctaaggtcatgaggctcttcttcaatcttgcactcctgaatcgttgattgaaattactggcaatatgacgaaggcagaaaacgtgatgcgcaaagggtggttgccaaccggcatgattctgcactgcagatataatgctccggtgccgatctgaaatgaggcatatattttgcatctgggttacgtggaagcgaatgttagcaaggaaatattcccaagcttccaacgtctccccgtcgacaatggcaaatgccagtggcacgcattcattattcccgtcctgactcgtggcgatcagcaattttcctttgtacttgccatataagtgagttccatcaatttgaatgacgggtttgcaaaatttaaaagcctcgcagcactgtctgaaagtccaaaatatgcgctgaaacacacgcttccctcggaccagtcgatttgccacaaaataatcattggtttgaatatcaaaaaaagaaccaggtgaaaaacgaagcatgtagttgcaccacctcggcaaatatgcgtaagattcttcccaatctccataaatcattgccatggctctctgcttcgcataccatgccttacaatacgaaactttaaatccaaagctggtggtgatcctctcctgaaccaacgcaatgcacacgcccggttcctccttaatcattcctgaaaatgacatagtgagatacagattaacaacaaaccttaacacaaattaacttctttctaataaagcaaaaattctcaggtcataccgactacaagtgaagcaatgacatcaacatcaagttgtctatgatcctgtgatagacggtcgttgaggcaattgtgctttccaccccatctggaaaccacccacttctcaccgtacactggttttatcaccctaaccctccaagggcaaccatccttgtgagcaacacacttcattgcaaacttgtcaggcttgctctcaaccacaaatgcttcttgatgctccctcattaggttccgcttaacagcaacttgtgcctcctttttcgatgggaattcctgttcaacatacaaatcgtcccctatttgccaaggaccctgcactgaacccgatcctgaagctgagccgctaaaagaagattcttcgcttgggtgattccaatcgatatatgtgtaatgtggaatcccgtcccaaaaaggaacaaccgcaccgcctttaaatacaatacacaataataagcattggtttgcaaaatatatacatgaacaacagttatacgaaatcacttagggtttaagtcatgtaacttaccttcaactggttgttctgattgtgtcggtcgaacacccgcacggttccgcatttcagacggccccgcatcagtgtgttgctggaatgcatttgcatccaccccaacatcttcatcattatcggacgcactggcattctcctgaagaagacgatcttccatcgctatattttcatcatcatcatcttcttcatcgtcatccataacccaagttgggtcatgtgaatcttcctgagacatgtttgcaccaacagcatcatatgatgctgcaccatcatatgatgctgcactcctgggcaaaacaactgacctcctgggcaaaacagcttcctcaactacagtgtaatccacatacaattctaaaaatttcttccgtccctgattaaaatattcttcaatggccatttgcaattcttcatcatcctgtattggaaaccccatgtattcatcttgctgccatattcttgccgtcagcaatgtgatacaagtgtttccgtccacacccaattttggatgtatcttctgatgcagatcactcaatgttgcatttcggttgattcgtgtcatcctttggtccccttcgaagacaacacctcttcccccttgaattttccttccgttgaaaaaaaatttaacacgaacaacgtccgcatcacttgaactcatttcctgcaatcaacataaataaacgtcaaaaacacacaaacacccgaaaccgtcaattatgaaacacccgaaaccataccgctttaacacaaagtagacaacctaacacttctacagatgtagttactcccagtaaatcaccaaatggtgaaagaaagtcaatattgtcaaagacacaaagtcataaagaagtggtcttgtttacacaacaacctagaccctaggtctagtcacgccaacccatacaccctaaccaccacatacgccttaaaccctaccacagatcccctaaaccctagttgtgttccccctatcctaacccctcatcaccatataaaccataaacacttaagctgaatccctaaaccctagctgtgacaccaaaccctacaccctaatcaacacgcgcaccataaaccataaagcggtaacacttaaaccctaggtgtgtaccccgatacctacaccctcagccagaacacttaaaccatactcaccccataaaccctaatcacagtatcaacactaaacgtaaaccttaaccaaaccctaaatccattagcctgacgtctataacagaagatcttaaccctaatcagagccaacgaactacaccctaaactaacacccacaaaccccctccctttgtacccgtagtcataaaccctaatccccatgtacaccccaaaccctaacacaataaaccctaatgacaatgtaaacccctaacctaaactgcaagccatcaaccacacgtatgtacctgcaaccctaaaccctaatcacgacatatgccctaaaccctaaacctagatatgtcccccaggccgtaaaccctactaacgatgttaaccctaatactaacctaaattacgtaaccctaatccctagttatgttccccctatcctaacccctcatcaccatataaaccataaacacttaagctgaatccctaaaccctagctgtgacaccgaaccctacaccctaatcaacacacgcaccataaaccataaagcggtaacacttaaaccctaggtgtgtaccccggttcctacaccctcaggcagaacacttaaaccctactcaccccataaaccctaatcacagtattaacactaaccctaaatcctaaaacgtcaacacaacaaaccatgaatctaaaccctaaactaaactacaatacctaaaacattagtcactaacctaatatatatgtcgctaacaagttcgtatgatccaaacaattttcttatttgataatacaacaaactaaatacaaagcacagtcagttaaatcgacttacttgtcagcaacgcttcgaattcgacagggcttcgcttcagaggatatcaagacccaagctttagagagaaggcagaccgatttttagagagaaggcggaatggatcaaatgccatttgcaggggcaatatatagggatttgggggaccaaacacgccttgccagggcgtgtttaaacacgcctagctagggcgtgtttaaacacgcccaggcagggcgtgtttggctgccccaaatccctaattattgcccaaacaacccccttttgctaattaattaattaaataatattatttttaaatttttgcctaattttatacgttgtattgtagacgtgttgtgtgatgatgattttagaatttattgtatccccatattcaagttgtattctattgcatctgtgtttgtcaggaataaggggcctattactgaagtgtattccagaggaaatatgaagataacaaacccaactgattcacaagtcaattaattttgcgtttacatgggtcagctaggaagttaagagttaattgctataaatagtaatttataaaaactactcactgtttatgatgtagttgcagggtataatggcttttagtctgaaacttttcttaatttctgcttgtcgaaaggactaaagggttcatcataaacttttttgcatcattccttttcatgaggactagctcctttttagttattactttaccttacaactgaaagtgagaaggggttgcacacacacgcagatagtgttttaagccaattcccatgtagccaaagtttccttaccaagaaaagtatacctggtttttctgttcacaggttttcctgtaggttgacagtgaactgaatactgctcatgtataattatattagggactgacttacataatgttgtaatcagaactaatatttactcaatgcagtttcttttaaactatctaagattactcaatcattaaacttatattgctgtctgagatatcaaatagtattattcacttttttttcttctgaaaactttgttttctcctgttcaggtgtttctaaaccaaaaggaggagttccagtggcaaaagctttcacagttctttgactaaagtatattggtcaagtaaaatatcatttgaaggagcaatttaattaaggttagtaagtgtcggtaagataaatcaagcaaatttatacttcaacataaagcaaattttcaccgcctaaaaaaaatgcaaccgcctcactagatgaatgaagtcgtcactgaattgaattgtccaagatacggcaattgcggcacctccatagttgcaccatttttcattcttagccatttagtttataatattttattgtattaactttgcctataaaaaggccacccatgtaacattttaaaaatatgcagtgagtgaaggaattagtgagtaaaagttaagctgaatttctctcttcctcctagtgtgtgtgtgcgttagataactctctctcggtttatattttttccgctgcgtgtgagtctttgtgagttgtgagaatctgtgagattataattttgttagttcattgataacagtaagactaatgtgtgactttagattctgagtcattctgaagtttacctgttgaaagtgattataaggtagcacagaatggaggtagtatcagatgaagaagccttcttgtttggcatggaactagcgggtggcactgctgtctccatggttctcaagtcagctttggagctatagccaaggcaggtcctggagcttacctttccccttctcatatagctgctgagatcccagcaataaagaaccctcacgcaccttctatgctggaccgcatgttgcgcctcttggctagctacaacatacttacacactccatcaactgcctcatggtaaggctgaaaggcactatggtcttcacccaaaagccaaataccttgtcaacaatgaagatggtgtctctgtggctgcttactttctcatggaacaggacaaagtccttaaagacatgtggtattgtgtttcactattcctcaacactttttttaatttttttctctctttcttctggcccttttgattttattgtattagcaaagttagagttagaggtataagttaactcccattaattgatataaaatgttaagtatgaataattcaataactataatcacctttgcccatatgactaaaacggcatagatagaacgcttaggattttttttttgcgatttttgccaaaataattgaagaaagaggccaacaaaattttagccaatgaacttagatgtcaaaggtaacttcactataaagaagagagtttaatttgtaatacaacaagaaagccttatccaactaagtgaaattgactatataaatcacatgatatctttcaacacgtttaaaaatcaaaacttgaaatctttcttgataacttgctccaatgtccttcttggtctcctcctgtttttcacaatactaaaatcaatgcaatctacttttttaagtgacatctcttgtgattttctttacatgtcaaaattatcttaacagattttgtcattttttccttaattggtgctatactagccttttatatgttctttcgtataatcttacctctaaagaaaagattctcacctaaaaatgagaatttgtaatgatatttatagttttatatgtcactataaagtaaagattgtcagcaacataaatcaaatatacttgcaacgaaactttttatatatataattagtggttagtgattagtgattagtgattagtgaagtcttagatatagagtttaaaggactgtattcttgtaggtaccacttgacagattcagttaaggagggtgggcatccattcagcaatgcttatggaatgactgcctttgaattccatgacacaaatcctagattcaacaagcttttcaataagggattgtctgatatctctagcatcacaatgaagaaaattcttgagatctataatggctttgagggtgttggatctgtggttgatgttggcggtgggactggagctattattaatatggttgcctctaagtatcccaccacaaagtgtgttaattttgacttaccccacgtcatcaaagaagctccagcttatacaggtgctttttagttcatatcttacgagtttggattgactctactgactataaaaaaattaaaaaataagctaagcgagtgttctaacttggatctttcttacattctcattcctgtgataattaatttggtaatagtagcatcatttgtatataataattgtatttattgctgggcctgggatgttaatttgaagtgttgtttggttttcctacttggatccagactattgcttcctgcatctttctgcaggaatgttttattttctttcgaattggtcagttcgtaaatcaaaatgtattactaatttggaatgtaattttacatttcggattgattagtcgaaagccaacaaagcgtgcagaaagcaacgaccttgaacccttaaaaatcggaatttgaccaaatggcaagtctcttaactcaaaattatcaatgggaactggtcattttaaaattttaaaattcttttactcaccaagttttgtttaatcaaattaaggccttataaggtttattgatgaattgctatcacttttattaagattttttttatcttacacaatttataatatggtgtttttatgttaatttaaaattaacctaactttattttttatgactttgttaatatggtatttcatgtcacctaatattttaatgattggttggatttttaaaagatgagttaaataatttatcacattttttgttgtacgtgatattatagaactaatatgggtgtttggtgcaggtgtggaacatattggtggagacatgtttgtgagtgttccaaaaggtgacgccatttttatgaaggtatgttattaatatgatgttcattcgctaaacagtccattttcaagtttttatattgattatatttggaaagagccaaaccaagttaaaatgttatatttcaataatatcatgacaatactatttttgtatgtagtgggtatgccatgactggaatgacgagcaatgcttgaaattgttgaagaattgttatgattcccttcctgacgacactggaaaagtgattttggctgaaggtatttgtccagaaaccccagattctaacttagctgcaaggtgtgagtttcaaatggatgttatcatgttgtgtcatagcccaagtggaaaagagagaacagaaaaagagtacaaggccttggctaaaggagctggattccatggtttccgaatagcatgttgtgttctcaacacacatgttatggaatttcttaaaaaggcttaagttcttacatctgctagttgtattttatttttgagacttatttgttggctacagaggtatgatgctatatatccttgtttttttttataatgacaaattaataattgtaatgatgaagaagtttatgcaaatttagcgacaattttttatttaaagaaaattatgcacagtcataatgatataatgataattataatttataaaacattaataggcatgtacttgaaaagaatatcgaattcttgttattacctcaaaataaactgtgaacagaagtatctaacagtaatggtctaacccattataggttcaattcgtttaaaaatcatacgttcaaaaaattaatatctataattataatatcataaatcttattttcataattaatattaatagtctaaatacatgtaattttaaaatttctatggtgtcccagtaatttggaattttgatattgttaatttttaactaattaaattacatgtcattttttatttcaaattagtctttgattattaacttttaaaattctaaacttttaaaattaaaaaatatgattaaagataattttaaaagtttgaaccttaaaaaatatttttagttactttcaacactttttataaaaaatattttgggtttaggatttaattttattattattattgtttcttaagcatactttttataaaaaggtgtttcttaaaaataattatttatcatattaaaaatataaaatcgtaaatatattttaaataattacaaatttatttatatgcactatatttttgaactagaagtgccttaaccataatcgttaacatatcatgattcttttactttttacgtaaataaaaaatgaattttggataacaatatgagaaagttatacaccactacattcaactattttttttccgcatttacacagataaaaattattattattattatttgattaaaaaatatctgatctgaatcaaattgctatacgagacgagattctgaactcagcttacgtgtgttagtttgcacttcgcacacgaagacaaggagagttatttgttgtttttgaaacatatcctacgtgtgaacttgttattggatcgatgacttacaccgtccaatcaaaaacccacacattagaaaagccgaagttagggcaacgacgccgtttttccagtttcgagtttccagcaaaacacttttaaagtctgaaccaaacacacgttgaaattaaaaaccacaactgcgtgtgtcgtgttgtgttgtgttttcttgtttcatctccatccttttcttcaaatttccgagaagagaaacttaccaaggtatctatatatcttttgattttgtggatccgtgtttttgagacgtgtgtgaatttaatcgattgttttgcagatgaggttatcattgaggcatgctttggtgtttgcgttaattggggcgttgtggaacttgcaaagggcagagggtatccgatttgtgatagacagagacgagtgtttctcccatgatgtaaagtacgagggtgacactgttcatgtctcttttgttgttattaaggctgattctccctggcattacggcgacgaaggtgtcgatctcgtggtatgttctttttcactccatctcattctatgttaccgcttttattttcagctttatcactttcaaggggtatcacaattactcaagctattaatattatcatatatattattgacaggaagtttagggaagggaatagaaccatagggtacatgaatacaaagagaaccaacaataattgctttctcttacgcctacctgttggctattggtttagggtttaatattggaacaaaccctcaatttcatctttgaaatactaccctttctcataagtaatccctaatgtaaaaaacctatataagtaatttctcatgtatttgaaatcatgctaattagtcccccaagtattaaaaggcccttcaaattggtctctgaattttactaaaatgcatcacctttgagactaattaaattgatgaatattcaatacttgagggattatttatatagtttttttattattccagagactactctcataatagacaggataatacttgagggacaaaattaatagtttattcttttatattgtgaagctaaagctattatgtagctctctgggctgaagaagctttctgtgctattcttcactataaccatgaaactgttatttgtttctagatcttgggatccgttgttaagcttaaagccttgaaccccattctggaaattttaattcattgaccatgaagcaaaaagtatgtttgtcaaacacctaatgaagccacggttaggagataactacactgtgcaaaacagttcacagtttttataggaaaaacaaatgcttgtcaaacacctaatgaagcaaaaagttttatcaatggtttaggagataacttcattgttcaaaacagtagttctttaatttagagaaggatgagtggtcatagagatgttgtgcattatatgtagcaatttacatgtatcaccttttacatttacaattacatataaatggtacttacacaattgttaggaataccctttctttgaaatgcttttttctttctttttccttaatacctacccaatcatatgttggaatctcattacaccacaatgtaagaatttcaggtaaagggaccttctggcgagcaaatacaagattttcgggacaaggccactgagaaattcgattttgtggctcacaaatctggggtccataaattctgcttcaccaacaagtctccttatcatgaaactgttgattttgatgtacatgttggtcacttctcttactttgagcaacatgcaaaagatggtaatgccccttctatgaggtccacttgtatttcctgttttttttttaaaaaaaaaaaaatgtaaaacactgctcttttaagttacatggaagtctaaaaaataagagaactttcattgaaactttttgtgactgtctgcagagcatttcacccctttgctggagcagattgggaagttggaggaagctctatacaacatccagtttgaacaacattggttagaggctcagactgaccgccaagcaataggtattatttaaggtttactttgctgtttatcgcacaatttacatttttctgtgcataaaatcttttatacctatcaattatacatattactcgtgttaaagataaaaacccaagtttatgtatgccctcttgttttctattcttgataccatttaatatgaacaaatgtcccaacatgtgatcatcctaatttatttagataccataccaaaagagacctccctgttgagaacattgctccctatctctttgacaatgttcactgttcactgttgattatggtgaaatgtccatttactgaacaaatacactaagcatcgtagttgataaagctacaaactggtttcttccttctattaacacttcttgactgcggatgcaatatcatgttcacttatgtctggaatgcagtgaacgatgcaatgagcaaaagagcagtacacaaggcaatttttgaatcagcagcactgattggggctagtgcgctgcaagtctaccttctgcagcgattgtttgaacgaaagttgggtacctcgagagtttagagctacgaaatgttctgagaatctgtaacagtacaaatgagaatgttattttaaacttttttccgttgtcatcacatggatatttatataactagttgttcaatcctactcataatacatgtggaaatatgttatttaatgttgtttatagttgatttctttttccggtaaactaaaaaatgacaggccatttctacgctcccaccatgtcctattcatctttttttcgtttaatttacttctgccagtttttctaatcggtaaatgttaattgttagaatgatagatttgtttttctccttcttttcttatccggtaagtatccaatccaccttcccttcactctatttcagctgcttaagttgttacggctcttatctctctcagatattgaatgtaagttgcagtggtaacctacattctcgagtcgtgccatatttaacaggaatctctaactctatcagcggcttctttaccaaacacgtatttttttttttataaaaaataccaaaatgtgtacttttctttttaaaaaaaaggtaaatcgtgttataaaacgtaactttgaacaaaaaaagtcatgttttgactttgtatattttgtaaaatttaatttactaaaatcaacacgacttattcatttttataatttatacccatttcagtaatttaaaataattgctgctgtatataaaaaaagagacctctatcagcatttaagaacttattatagcttaaaaataaacaagataaagaataggattgaggattggctcataactaagcttaggtatagatggtaacaggaaaaattcacgaagtacaatgcaccggtaaaggaataatttacctcgacaaaggtatgtaagggtacgtgcattaacccttaaatttgaatcaaattattatgtaaattaaatatcaaattttcaattagggatagatacatatccattttctcactttacagtttatacacttgaatatcaaatccttaaacttaagaataaattctttggcccaggagagtgactggcatctccttagtaacattgcaatcaactttctgtaattatgattttgttttttttccgtgtgactcgaccgagggtcgagagagatgaattagtataaaacagttaatccaacaagaaatatataaaatagtacgcacgtcgaccgaataagtaagtataaagtttatacacaaatatcaaactctactgtaaagaatagagagagaagtataccagtatatgatgcaataaatactactgattccaaataaagcccaagtacatacaccacatatgcagcaaaaccattttttctgcaatgatggatttgaaaaaaacgtagcgtaagggccgggattgagcatgaagcaagaagaaggtaattaagttacatgttattagcaccattccttctctcattcctggcattgttgaagattaccgagaactcccgagtccccaaacttaggtaatgctctacctctacccctctcctgacagagccatccatcaacaaatattaattaattgcatgcgtacgtacgtacgtaccgccatggttcatcactagctcctaacttctagctgcaagatcgtagatcgaggaattgaatgatgtggctttggctccttaactgttagattcttctaatatatatttatattatgtaatgatgtttgttaattgatccttctccttttccttgattttcagttcccgagggcaaggccaaggaggaagatcgaaaaacacagacaaacacagagaagcgggccaatgtcaatgactatcaaatttatgagacatacactttctcttttttcatgctttctttacggctgattttattataagtgaacaaaatattaaataaataaaattatttattgtataacagacatatataaaaaagggcaaattattaaaaataatgcttttttaataaatatttcgaaatttgggactgttttgaaactatttagaaatttggggcagtcaaatatgtctaatttaggcgtgttacagtccgtcgctaatttggtcgttaatatttttaaaatttgaggtttttaaaatccgtctctaattcggtcgcaacacattttaaaaaaccacaatattttttgaaagtgttagagaccgaattagtaacagaattacaacctcaatattccataaaaagtgttagcaacggactggaacacgcccaaattgaacttgtttgactgctccaaatttgaaataatttcaaaatagatccaaatttcaaaatatttattaaaaaaatattatttatttaaatttgtctaaaaaaagagtttaatttttatatacaatcaatcaaatattatgataaaactattttctcgtataaaagtacaatattaaactttttagtcttagttgtttgaaattagttttaaagatttatgttaacaaaatcttaatttagatttattgttccatattaaagttaaataaagggaatattaattattaattatttttaataactattaattataaggagaatatgttttcaacgttgattttacatgttcacaaaacaaaaggttaatttcttattttctaaatatttttcaagaaaataacaataacaacaaagtaaactttatttttataaaaaagtaatataaaaaatacgtaaatataacatctaattttttttcctgtaaaaaaaagaaagaacttaaccgagaatttgtttggttttaaaattcccaacatcgtaaagactaatgactgattgatggtattttgtgaaactaagcaaaggccagtgacactatggaatgctcggctctataaacacaacttgagcaaaattgaattcagacaataaaaatgtataaaagttgattgaactttcaaccaaaaaacaagggatagtacataaaagacaaaaaataaatagaggctatggaaatgaataaaatgggggagagatcttaatattattggagtgaattactaaaaggaccaaataattacaacaaaagaaacccaatatgtatttgaaaattgaaatcaaacattatgagtattgtctggcttggagtggggccggggtggtgaaggtgaagcagctgggggtggagttggcatcccataaacttgtgggttggtttgaacctctctccttcctctggctcttccaaagaagtaacatccaaaaccaagaagtaagcagaagattatgaaaggaagagaaatcaccacaaccatccccatcttctagtttttgagtgaatgaaagatactcagaaatgggagtatttatatcagtattggattctctgtcatcggcttaacgttcaagtttctaacggccacttttctgtccccacccacattagctgtctttattacctcacttcactattgcctctggctagcttggaattattccttttattctactatttatttcttgtttttttacattttccttttccattttctcatgcatattgcatgtgcacggtatcgacttagctgccactgccactgccactctcatcaaagtttttactattattaattaattaactacaataatttttcatagaaaatagtatttgtaatgctattgtttaacatattttatataaagactaaaatagaactttggcatctcattttaattttctaagtttaagaattatcactttggtctcctaatttatgtgacctaagtcaacccccatttattagatctatctctgagaaatgtagaagttcatagacaggaagtagcaaaaggttctggaacgtctccatgtctcagtgataaaatctgtaactatttttttgagaaggaattaaatctaagtaaattagatttttatttttatcaatcttttataactatgaaaataatgcatttagattcaaatgcaatgatggcatatgtaacttttaaaaatcaaaccgagttttctctaaaagtattaatcccaatacatacttttatgaatgtcataatttatcgaagtttgatcccatttgaaagagagaatgattgtatggttgaacacgatattaacgaacttgtgttttaattttcaaaattgagcgatgatttattttatgaaagttatgttgcaataccctctctattctcgtcactcccgtaattgctatttgtttagtacacagagtaaaaaataatttctatcacattttaatataatactcttcaacatgtcttaagacacttgatgtcagagcagaaccatagcaacaagtttttttttttttttaaaaaaaaaaacaattgaggtattaatatattgatttgaatttgtggtatatatttggtgataatcaagaaagtgggcgaggaataattgtaagtatactgtttgaaaacggaaaggaagaaataattcttaagtttctaactgcataacgtccaacgggggaaaagaacaatgcggttgcaagaggataacgtttaaataaatttgatagaaaagcactatggtaaagtacggcagaactaaaaagtcataaattagaaacaaagaatgaccttatttatctaaaattaattttattgtccaccaatggttacctcaaaagctcatcaatccttgacaaataattttttgtcaaattttattgaactttcagccaaactccaaattagttaggatctttttcccctgataaactgaggggttaagacctaaaaaaaagctcatcaatccctttctaaacaaagcagattgaccacaaaataaagactctgcaaagtattaaaatttacgcttccttgggaagaaaggaatccaaggaagcaacaactaataatatcgtagacatagctcccaggttgctaaccgcaaaagaaaatacaatacacttgaattacattggaggcctcccagacccaagcagctgaccaactagattagtcacctagcaaaaaaaatataaaaaaaatctgcttagacaataagacaatcaccatttgcagtttcccaatatttcaaaagcaaaaaccatattgaagtcaggacttctgtaatccacatatacttagtttgccttggctttcatgaaattatcaagacaccacttaaagtctaaccaggaattttcgaagggagcacacatttaaccaagtactaaaacccaactaagatttcatcctaaaacatctatgtgagaaactatcttaaagcataataaagagtttgatgagagaaaaataaggataactaatagcaactcgaataagtgccagtgatagatccaaagtaaacttaagcaacatcttacatgccagtattttgaaacacagcggtcaatgcaactattttcacccatatttagctcagactccttgtacctgagaagaaaaagtgataaacagatattatcataacattcacattgagccattatcaaaataatgcaacagcagataactctgagaaataagaaactaatttccaaattgactggactggatgacatttgaagggcatcaaacatgacactttctcaggcagattatgcaatcataagagtttccctacctattgtcaacacacttcttgaaacaggtctgggtcatcctgaatggtagaaacaacagaaggttagcaaaatgaattattatggcaccaacaaatctcataaaaatatgcagtcagattgtacagtatacttgtttacaacagcaaacaatatcaaggcaagcaagagcagggaaacctacttgttgaataattcgaccctatattccatctccttttcagccattccaaatatctgctccatgaccacatgaattattgaaacacatccacaactaaataatcaaataacaccgagaaaagcaaatttaaacttgaaatcacattggggtatcaaattcaccacatcaaccaccagatcagttttaccaaagttggaggaagagaaaagaatgcctacctgttctttatcaaaggcagtgggcgagatgttggaagccattgtaccctgaaaatcccctaaaaaaataaaatgatgaattcatatcacggaaattttatgaatattcagaactaaaatatacgattgaagattgatgagaggtttttgtgtaacttaataggtattaggttagtaaacaataatgtgtgtgtataatatcaaattctttaaatgaatttttatactattcgatatttctatatatcatagtcttctctcattatcttaggttcttgattattttgtacaaaaataattgttgcttagggagatgggatgtgttgaggatattgaagttgtaccatgacacaattggactataagacaacgtcagtaagatgataggctattagaattggaatagtgctgaagggttgacataatttggataagatgaagagcatcaccatgtagattttcattattttctaatagattaaaccaaataagagaacacgaacaactaaacatgtagaatttcttaataaactccaaaaatatcacttcgaacaaaatgattgagaagcaaatgagtcatagcagtaatttattgcttgggtgattcaccatttcacctaacactttttctttgtatctcccatgcttctcacttgaacacgacattccaccaatgaagtcccaaatttttcccattatgtgaaatttaggccaatagaaacaatgtgaactgaataggttttcaaaaaaggtcatttactaaagttcaggtcagtataccaatatatcctacaacctaaaatagaggctaaaatccacaactgacttgaaattgacttggggaaagcattcaactccattctcatagacacaatcttttcaaccttaaatgcttgaaatcctaacaagtttttaagtacatgcagaggtagtaacactgcaagagagagcttagaaagggtgaacatcacaaaatcagcagcaagatggttgaaaactatagaacagaacaaagattttgttgtaacagacaaacattaaaactaaaactcactaacgattcggtcttcaatcccaaaaaactttacgatttgaagaaagcggagctgaggaaagaaggaaaagaatgaggttaggaagcaaaataaaatcgaaagcaaacgaacatgagaaagagaaacgtacaatgggccgagtttaagtgatgaatctcgattcacaacagagagagagagagagagagagcgcgaaaacgtaagaagctgaggcaagctaggctagggttcataaaagaaatttcataaataggccagctagtattatgcgtacaaatataatttcaataaaaatttattcaataaaaaattaaaaataaaactataaaagtgaaagaatgaagtgaggacatagtagaaaatagctccattttttatgggaatgtaagatggacctttccatttccaaaaaaaataatttctatttcaccatgaaaataaaatgacaagtataaataattcatattgcataaattaataattttttttatagaacttatatcaaacatgaaaatacgatgttctcagtcactttctcgataatctttttcgataccataaaacaaatacaacttttaaataaaacttattctcatgtaaaatagtttaaaaaaacagtataaggtaatttgcttttgtttaccattctaaaaaatattttttttaagaaataactgattttatgaaaaacttttcaaactaacttctgattttagtcatatttttttttagtttccagtaattttgaaaaattgaaacaaaatcatgcaaaacggaaaaaaaatatttcataaaagaaactataacaatcggcctaatatttaaaattttaaattctcttacaaattaaattttctatttaaaatctctcacctaaatattcattctttacacaaaaactagtgtgataaaagtacagaaattaagcaggtatatattaagtttaccatttatgattctttttatattattatagttttaattttacgattttatatatttacgtatttggttggataaccatcttttattcctccttcatgttagttatcaaaagttcaagaaatattcgtcgttcacttgaccactaatcttccaaactaaaaatcttttaccaaatggagtagaaagtatgcgctaacattactcttttatataagtaactggaagaaaaataaagggaataagaataagtagaatagattctatctaaagctagcattaattatcaagatcttattaattcgaataaaattaaacttgatctcaaatttaaattttatatatgaaaaaaatataattaaaaaaactctaatagaaataattagtcaaattttttaatagatatttatcattgataaatattttacttcaataacaataataacccaaaaacttaatgtagacggtgcattgtaaatttctcatattaatcttaggaacaaaaaaatatcttggaatgcttagtcaatcctactgcgtgttgtgaatctttttaaccaaccccctaagaaagagaaaatactttgacgtgcttggcgtgcgagaatattcagaataaaatgttagatctaaattagcagacgcaagaccaactacaacttcattatttccacttttttggcaatttcagttctggaacacattttgcaaaccacgggaatctgtaatcttgtgcttggaataacaggttttataatgattcattccaaaccaaagtaccccaataaaatttcggtgaaaactaaaatttggataatattgtttcatgttctactttgatgctaagaaaatttcactttcacaagatgcgacttaaacctaacaactatgtagctaaatttctctctcgttcggtcttgtccttgtaataaatttgaaacttgtatgttcgcttgctaaagagggaggcaagatcttttgagctttgcagcaaacgctggctcttaaaagtacatctacggaacatgaaataggtcttacagaagctcaacaacaagggcagatgcaccacctcctccattgcaaatgccaccaactccgtacttcccattcttctgcttcagtacctgcaggtgatgacttttagattaactgaatcgaaaaagaacacattcaatattggggaaagatccatacatagttagtcaaattcataaacaacaacaacaaagccttatcccaacaacaacttatagtcagaattataagttacttaaaatatcagatgatcactttaaaaatcttattattttgtgttgtaataccattcatataagatcaaatgatcaagatttgttcatttcactctcacaacaaactactctcaatgtaatttattaaaaaaaagtggacaaaataataaaattattacattatctttatctttttgaataattgaacataacgaatttaaataattaaacaaagaatttaagagatgagcattatgatagacttttttctacaaacacaaggcaatctgtcaacatgcatgctactatatattataaaaaatcaaagttatgaactgagcacatacccccaaaagtgtcaccagaatgcgagcaccactgcaaccaagaggatgacccagtgcaacagctccaccatgtacgtttactttttcctgcaaaataatagttacttgagtaaaagaaataaatggaggggtgcatccattaatggtcataatgaagttaaattatggattatagacaaattttaacatgttctgcactgtgcaaagaggggttctggacttacaacagcatgcactcttcaagacagtcaattggaaatagtttattatacatgcactaatggattacaactttcgcacagtgacaaggggaaaaactaaccgagttaagtccaagaagtttctgatttgcaagagccacaacctacagacagcaatatgaagaattaaaattcaccgcatcatgagttgaaaaattactaccattgaaaccttgacatgaaatcctaccgcaaaggcttcattaatttcataaaaatcaatttgtgaagtctccaaccccgccttggcaatagctttgggaatggcaagggatggagccgttgtaaataactctggttcctgcacagctcaacctcatatgagtatgaaattataacatatcaaacactagaaataatgtgaatgccaaaatggtttttctatttcttattttttatagtctgaagatgtagttcatatttaaaatatattttacatacctgagcagcatcagcatatccagtgatttttgcaataacttgaagcccaagcttcagtgccttctctccactcaccaaaactagtgcagcagcaccatcactgttagcaagagaattttcattttattaaaaaccagggctaatcactaatgtcaaactaaaaattacaaaaatattaatagcatttgagcgtttaagacacacatattggagatgtatatattgaaaattccatttcatataagaataagatgaacaaatttggaccatacaaccatacacgaagggtcaatattaaaagttttttaaggtcacacgaccaattaaaaaagtcatttgactccctatatatatatatatatatatatagtattttataacaataaataattgacaagggcatccaaatacaaatcattatgtaggaaaaagtttaacaaatttcgataatatattaaccttatgctggaagcattgccagccgtaacagagcctccggtctccttgaaacttggccgaagtttgcgtaacttggcagcatcaaactggcataggaaaaggaaaaatttaacaatatatttatttgtattcaactgaaagtatagacaaaattaatgactatagtaacaataattgcagctagaagtaacatacatataaatgttgttaatgtgaagagaaaaaaatcataaattccaatcccaactcttgattaattatcaccttatagtcttctaacaaatttaaagtctcgtgaattattgggtaaacatgtgttttcgtaggctcaccatatttatacaagaacaagtattaccatggttcaagttatttatatgggtacctttcctaggccttcatccttatcaacaactgttgatggtcttccccttccgccagagacttcaactggagcaatttcccatgaaaaggcaccactttcttgggcagcaattccacgttcaaaactctgaattgcatagttatcctgaggataaaacagagacatcaacaaaaaattgattacaatggtcctaccgaaacctttctgaacagaaattaatcctaaaatacctggtcgtctcttgttaatgcatggttatctgcacaaagctcagcacacactcccatgccaacatccttatagacatcccacaaaccatctttcaacatcccatcaacaagtgaatcatgtccaaggcgtgatcctttcctgaacttttagtattgaatcagtttatttcaacacaagaactaatcttaaggagagtgtcgaattaaaggcaatattgaccttgcttcagccaggtacttgggtacattagacatgctttccataccaccagccacaacaacatcatttgtgcctaattgaatactctgtgcagcaagcattgcagctgcaataaccggaacaaggttaatatcctttttctgtatttttaaacaaaaatacaaagaaacaaatagaattgtttttattataaacacacctttcattcctgatgcacaaactttgttaacggtagtgcagataactgaattggatattcctgctccaagagcagcttgtcttgcaggagcttgccccaaattagcactaagaacatttccaaaaaatacttcttccacaagggatggatcaacattggcccttttaagagcagctacagatgaatgaaaaatatgtaaacacaaataagtttcaaatggaatgtaataagcactgacataggcttccatagttaccttcaatagctatcgagcctagcttggtggcagatagagatgacagagtaccaagaaatccacccattggtgtacgtgcaacaccaacgatgcaaacatctatagaaatcaaaacatatgaagtcaactaaccaaataaagggttatacagaataaaactttagaaggtgttaaatgaaccaaagaaagggtttataaacactctatatctataagccaaaatgtttgatgaaagacctcttggcttgattgaatctgaagatgctgcagctactggagccattgatagatgaaaatggaatctgtaatccaaaacattaaatacggacacatttaggtaaaattaacgagctaacatgcaaaatcattgagaactaattccatgtacgatggattatgtgaaacatcagaaattgacctcttgatatgaaatgattcagaaatttaaaaagaaaagaagcagcgcgagattgtaagaaaataataaaatttggaatggtgtcttaatgtgtccataaagaagcaaataagatggaaggagcggtgaatagaaaagtgaggaagagagaagcaaatatgatattgatgtggtgctaagcgaaacgcggatctgataaagtgttgagcaaagaagcttacgagagagagaagaagtgaacaagtgtccgactgatatgagtgcttatatatggtcagctcaggtgggaggagccacgagttacaattactcttattttcccaacattttttttttttctgctcgatgctgaatgattaaatcgatttagattcacttttgacataaaagtcatcttctgcaaattgagttggatcatgttttttcttaatcgatgatttggattggtttataattgatgttagcaaaactaaatcgatctaagcaaaaacgatactctttaatatacatatcttattatatgttccatatatgatttttatatattttaatatgatttttttagtgtttcaccgttatgttgtaagatgattaatcaattgattgacatacattttatgtttgttttaaaaataataatatatgtagtagtaagatttgaaccatccaatctaattcaaatcatattttattggattggattaaatctttttaagatactaatttaaatcgaacctaatcataggtttaaaatatattttttttatcaaattttttcttctttttagatcagtttgcaagcttttttttattagattggatgcaaatatccctaatttttataatgttattatctaataataaatcaatatgtataagaaatttattgacttctataattattttatttaccataatatcatgttttttttattgattgtgtaaaaaaatttaaactctaaatatatataaattaaattataatttttatacatgcatttattactaatgtataaaattgcattactatcatcagtaaaaaaaacaatgactttcaaaataattatcataaaagttaattaatttattatatatgataatttattattagataaacaatataaaaacccttttcactaatttttcatagtgatttacttcaatttgtttcttttcctttcttcttctcttttatacattttttggcttaggcgactgtgtaaatttaacgtggatcgattacgttatgatgttaccaaaaaaaccaacaaattgttagatagcatgctgattagggtgtgtagaaaagctttgccaagatagatataattcatttttgatttttttataaaataaatatttttaaatttccggttaaaaaatatcttcatgcacatgaaaaaagtcgattacaatagtgtcttcttaaaaataaattgataataagtttaaggtaattttacatacaacagtgattggtgaattggtcacgtttttggtacagagcactgtggggagcaacggcaaagtggtttggtgtggggtagttgaacagagatgataacttaattaaatttggaatggggtgcatgcgatgcacactaattgttttttatttttcatataaagacacacttgcagtccttgagccacctaccaatcaactaaacaaagtgcatacatataaactgtagccagcttttaatatatatatatatatagaaatgagatatcaaattatattgatgtaactttaacaattattatactatttttataatttaatataaaatgtgatttttatttattcagacgttaaattatatctatatagtattgagattatttatgtcaaattttgtcgaaattgaataacaagaagaagataatcaaattattcattttttagtatattttgaaatgtttatattatgttgactttaatctatatgaataaggtaataaatttttggattaatatgaaattttgtatatatgatttatgtgaaagaaattttcaaccaaatatgagttttaagaaaatattatttagttgaaagttatagaattgtataataattgtcaaaattatatcgatataatttaatcactttttatatatatatataaataaattgtaggcctaaaattagttcttgtctgcctggattgaagtatcatgtggcttaccaatgtcaagttttgaaattggaataactttggtgtttgatttgtatcggtggatagtgttagcttgatcgagcataagaggtagatgacttatttgacatctataatcataacccctgtataatttgtttatagacagtattaacgaggtaattcaaaatgatccgtcaagtaacaaataaccattacccaaatcaattgcttatcaagcatagctatgaaagagacctgaaatacacgatgtaaagcaatttacctacccgcattgttctttttagtgtgtttgataaggttttggggaaaattataggcttttcttattagtttatacaagttacttagaccaaataaatcaattaatttataaactcttagcttatagcttatttttaaataattagttgatgttctagcaagaacaaagtcttggcttaccaatttgtttggtagctatgaaatagaaggaaaatagaaaaaagggaaggataataaagaataaatgagaaatgtgagttgtttaataggatggaaattagagagaaaataaaataaaaaagtgtaaaattcatatgaaaccaacattaaactacctaaaatgtatgacaatcaattgtcatgaaaataatggattgaaaatactaaaatggattttttgtatttatttattttatttctcttaaataagacactcacatttcattttatttcttatatatttcaatttactctatttctcttttccctaatttcatcatttttatctctcatctatttatttccttcctaccaaatacgctataagagatgacactattgttcaagttaggaatgaacccaagaggaatcagcatggacactgacccatctcctttaagaccctttaaatataagagagaaaaatgaaaaacaatattattaaggaaaaatgaataaaaaaataaggtgttgaattgatattttctcaatttcatttttattgtggatcatatctttagttttacacaaaaagtgttaaactgatattaatatcttaatttttgttgtcccttagtttgtaaactttttaagattgtctttactttaatatttttgaattttcctgttataccattttttaggtttgcttcacaataaatacatataaaatgtataaattaggtaagaagtgagggaatagttgacaaactaataatcaatgttatcttgaaatttaaaagtgaaaaataaataccagatagtaaatttttttctaaaaaattaataattaaaaggaaacaaatgtcatattgattaaactttatttaaaactgcaaattaaaaataaactcaataaataaatagtgaaactcacaaaaatttatatatatttttaatttaataaaaaatagaaagtgaactgaaattattattagaaaaaaaatatttttaacttctatacttttcgttaaatgtggtcaaggtctatattttgatattcatcaattttatctttaaatttaaaaaaaaatgtaagtttagtcttttaattattaaaaaatatggcgaagttttagatagtggcaactaaatttatatatttttaaaactgagaattaaattaatcaatataaaatatatgaacctttaatacctttgattgaaaatatgacgactaaaaatatatattttcctattattaaacggtaccgtattggatccacaagcctaggaaccaacgtctcaggacccacagccattgcacgttgcttcactgacccacacggccacacccacctttacaaatgagctaatactagaattatattattaagcgataaacagatattattgtctttttcaattttgggtgataaattacataattatttacatattatccatataaattatttagatagaactattaatactaaaattcaaataatttacataagaattaaaaaactacaaaaaattaattattcttaaatttaatttctataaaataatttaattattatcttattaaaattaaatacttttctcaagaaaatattttttaataaccatgttgaatatactttatatcacgaaaaccttgttttttttattgaaaatatctaagtcatgaaagcttgaaaatttccaacttttccaaattataatatatatatttttggtccttatagttgcaacaattctaccttttaatttttatagtttaaaatattttattttgattcttatagttatgattttaaacccattttggttttgatcgttcttgtccaaaatagcataatattgttaaagcacccaattttataaaatcaaaagttatttaaggatttttttttctgaccatgaaacattaatacaaaatattcaccctaaaaataagagataaatattcttaaaaattgtgagtgcacataaattaaatattttctttcaacatttatttcatatacaacatgatttaaatagtactactgcatttaataactaaagaaaaaacaaaaaaaataactaccattaaaagtgtacctaccatattgaatcctcgagcctacgaaccaacggctcaggacccacagccaatgcacgttatttccctcaccttcctaaccacctttacaaatgagcctgtacaaaaattaaattataagtttaattattgttaatgagcgtaaagtttttatattctcaactaataaaaatatttttatataattatttcgataattattataaaaaataataaattcatcatacataacagtttataattaaataataatataaaaatctttgatatatatattatttattcttaaattattacagataaaggcgaatcagactttaagacgggatatgttttattcttcaaaaatatctattgataatgtaaagatcattcagcaaatataaaatctgaaatactagattttaattacttttaatttagccttatattaacttagagtatgaattaatactcaaaatccacttgcagttctgaagacaattatgaaaccaattgtttatactctcgtttacttacataaaatttaaatatatcttaaagtaaattttaaaattgtctttcataaataatatttgtggtcttttatataaaaataatattttaatggaaaataacaaaagttcagtgataaattttaacaaatggaaaaaagaatgttattttgcgactacgtgtaactttcataatgagaaataaagaagcaaacagtaatagaagttgcttaagtcaataaataattgatacatcagtcaattaatgttatttttgcatccacatatcagtttcttaacgagaaataatgaaacaaacatgaataggagttgcttaagtcaataaataatgattcatcggccatttaatattatcttgcaaccacatgtcactgtcttaatgagaaatcaagaagcaaataggaagaagagttgattaggtcaaataagtaattgacacatcatacatcagtcattaataattaactaataaacccattgattcatgattagttaatgaaaataaaaatgatatatttaacatgtttagtttttttttttggtggatgcacgtttaggttatttttggttttatttaatacttaattttttattcttggtctgagggttaaccagtggtggagccgcatgcaaatcaaccatgatcacgacattacctaaaaaataaaatttgtaataattgagtggtgaataattttttttaataattatatatacttatataattatttagggttaaaaataaaatttgacaccacctaaaaataaaatttgacactacttaaaatttggtatgagctaaatttttttactggctccgccaatggggttaacctatttaattgcaagctacgagagatagagttcgtttagtcgtagatatattacggtccaagacaagctttaccactctatgatcttaatcacggggtgttctctgtctaaaactagccattgaataaggaaaggctcacgggccaacagtttgctttctcacttagaaaactatgattttttctttgtcttgaagtcataaaatgccttgtagtgtcatcatccaatcatgtttctgtaaaattcgtggaatttgctatgcttgtgtaatttaaaaaattgaacatttacaaattacaagtaataaaatgaagatgaggataactttacgtaagtttgaaagaatcgaatttgttggtaaccatttatatcattttctcaaacttatcaagcatttttaccctttgcagggatctgacaaatagagtcataaaaatacctgcacattgaaatgctatatctatcagccttaagaataaattggaacatgattggacaataacttgagaaaaagctttataatatatagtcacctgcaccaatgaaagatccattcgcaatagttatgttgccttggctgctcataatgataccaagatttagcagagttcctcctaatacggtatacatagttgccatttgtaaagccgttgctttccgagcagctctttcagactagcaaatcaagttaaataatttcaaatttacaaaacaaaagttccagaataacgacctcctaattagaaagttgttcccattaggaaaatgcttagaaatacttggtcacacataggcatagcatacaccatgtgaagaaaaataaagattcaactattcacttggtctttataatgaacttcattttgagttatagtccttatacgaaacaaattgtaagttttaatcataaaaagttacatttctattgaaaacactagagtctagagaagtttttgggacgatatacaactgttatagaaactttttggcgataataaactactacaaaaaattgtagagacactaaaatttacaatttttttgttaagaattaaaataaaaaatggggtcaactataagaataaagaaagaaataaaaaaaaaaaactgacctcaagcactcggacccgaagttttagatcccctgcctcaagttgctttgtaaactcttctattctttgaactctgtatggcattgacatggtataggttgtagcctaaaggtattacacgagcaagcgttatcaaatatcaattcaagtggatgcacattagttgcacatgctatagataaatgcttcacatcaaatgagatttttctaatttaaggaaacattatccagaacaaaggtaaaaggtgtggtacatcatctgcttgctttcttatctcctccacaagctggggtgcagtgcgctgcttttgctttatctctaaaagctcctgtaacgtggtaaagtgtatgtgtatgagcatgcattttaatgcagtatgggaacaatatttgttcatggacaatctgaactttgaacctgtgagtagggtgcagcaatcttagcaaaggagaaatttggattgagtgtgtaacctatgcctgtcagaaaaaaagaaatacaaatagatgatgaagtcatacaaagaactaacatatatatccttttgctctttttaacttatttcaataaatttcaaagtgatacatattttgatcaacttcacatttaagcttataaataagttcataagaatttatcggatgagtagttaatttggttgtttacctaactgtgtcttaaatcagtcaaatttttcccaagaaaggaaggggtggttaccatcttataatgcatatactaatgtgaaattaatagtaaacattagggcatgtttattttttttttttttttttgcaagaatgaccactaaagagagaaagatagagagggacagtaagagaattgagaagatgcaaaccttcaagtgttgaaaacgccctgagaacaaaggcaaaggtggatggaaaacggaatggttggtcttgtgctattgcaaataaatcctgccacagaaagccctcaatagtcaataataaagtctggactagattctccagatagtttggaataaccaatagaaaacaataattctccaccttcagcttatcctttagttccattgaaacaaacacccaaaatattatgaaaaaattgaaaagcagctatgaattcattgatccaatgtaacaatgttaacaaacctccccaattgcagaaagggtctgctcctgatctggtgcctggcttagcaaatggtccaggaaaaactgcacagatctcctcacctggaaaataaatttatcatttatgaggtcaatcaagtgtcaagacacaaatcaaaatatttgaaaagcaagtagttgacattcttactgatgacaagtccccagtaggttggagggctccgagctctataaggcgttgtataacctgcaccgttgtttattgtatggttgtatgtttaaaatagtgtgaaagagggacactgaagttgatcaattcaagttatgagcaacgtcaaattcttttttgctgacgataataactggttagctggattgaaatttacaatagtaatcgtacttgaagcaaaagccattttatgtcatcgtgcttgtttgagttaattgtggcaaactaaaaaagttatcatgaaattaaaaaatgtatgttgattaaacacttaacaaaatagcgtatcatgatatcagatattgatttcttattagtaaaagacaatgttatgaatttaaataatccaaaagtagtacaaatccagacctttttggcatccttttcatacatagcatagaaaagttcaagcagtctctcccgggtaaaagatttgatctctcccatcatgccaaagtcataataaataattgcttcgtccacatcaatagcaagatttccaggatgaggatcggcatggaagaaacccgttttcaatatctgtaagacaaaaagtaatgataatttattaactcaacctttttggctacaagagtgataccaacacctatcttcaagtgacaattcattcctcttcttttttggttttaatataggttgagacattttacttattctgagtaaccaaaatgaaaaccatattcaacatcagatattactgttagatcgtaattagcagagaaccaaggtggtccacctgaatcaggtatgcctcagtagcacgtgatgagatacgcaatcgatcataaccacgcgaagttaatgtatccacctggtctattttgatgcctgtccaaggaataaaatcagagataggagcagttaaaaaaatacgttctctagcataatgtcatataaaatatataactttaaagaaagaattattagctcccataaatacaatatattatctctcataataccatagtgtcatagacaattaaaaggagaaacaaggcacattcattagttaagatgaaaacctggtacatactccatggtcaacacctttaaagcagtataatcccaatataccagctacaacgaaagaaatggagatgtggtcaaaattcaatatttttactagacattaaaaatttatacaatttataatcggatgtttgtgttgcctaaggaaacatacaggtatccgaacccactttatgtttctaaaatctcggcggaacctgtcagcattttttccttcatttatataatcaatttcttgatacaaaatactgcaaaatagcatgagcaacacaataaaaattaaggcattggaaaataaagtaatgaagaaaaggtgaaaaagcaatgagcataatttagcatatgctttacttcatgaaatatcgataacaatgcacttcaatgcttattacttacgttttacattcttcatatattccaatccaatctctaagtggaccaccaaaagtttcacttctctgaaaatactctgcaatcaactttaagttttctggacataacaaacaagcaaacttgtaatagttacaaacaaacaataaaatagtaatccttaaaccctaaacaaaagaattcactaaaatagtaatccttaaactctatgctgttatacataaataagttttggtaccaaagggcaaatttgtacctaacagtctaggcttttggattcattgataattggctgttggcaacatcctcttaatcaaaatccctaggttttgtcaatggaacaaacaaagtaaccacaacttactcaaatcaatgtcgaaaagcttcttcagaccaggcctttgaactttgatgactactttttccccattatgcagaatagcacgatgaacctacagacaggctcctccaaaattgatgttactatactaagaacaacattaataagctattatcatggtctacaagatgggagaaacgttctagtttgttctaataatggactaagccacatgctgcctctcacttcatgttacatttatcaaatttgaccaattcgaataaagctacaagtttttaacaataggaaaagattcaatgtaagaaaatataaggtcaaattagattgatccttttttctccctacataaagtcagtttacattttgacccatgcataataatgtctgtgaagtaattggtaaacgcttgcacgcaggggttaaaatgtgagtttttttaaggtaaggatcaaaatggaaagtatccaagtataagaccaaatttttaattaggtaaaatatctttggatcatgtaaaatttgataagtattaatttttttctcataattttttttgaattaatttggcccgtgaaaaaataaaacatatatttatttgtcttcggtggtaactttattagacccctaaccccttagacaattttctatatgcctaattcattattttttctctctctatcttttcaaacacacttaaaaataccagaatttggtgttatttcatcttttccctaatctcattggatagtatgagaaaattgtttaggaaataacaaaaattataattttttgggatgtttagttgccataatttgtttaatttattttggaatttaatgatcacaaattatttaatttatttataatcaaattacatgtgtaagtttgttacctacatcatatctaatggaattatcattgagaactaataaaatatgtcatttatttttacaggaatcaaattaatattaataattttatgaaaatgtaataaacagaaagatactttatcctttttaatttaaccaaaataataaatataatggaatgagctgggctagattcaaacacctgaccgagactagcagcagcaattggccgatcttcaaactcctcaaataatatgttaatgggagctcccaattcactctcgatgaattttcttgctttcttaggagagaaggcaggaaccatgtcctgtataatgttatattaagaaataagaattactttctggtcttgaatataggggaaaaaaaaaccctcatgtatattgattaaaaatacaagcaaatcttaattcattttatttaacgaagttattttcagaataagttttatttaattaagattttattttcaataatttcttatatcgaattttaataaaggatagtctaagagaattttttttgaatgagataagtagaatagatgagtctgaaaatgagaaaaacaaaatctacagagatacctgcaattttgcgagctcatccacaaattgacgtggaaatagatctgaccttgttgatgataactgaccaagtttaatgaaagttggaccaagctgcaatacacacttccttaaccacgaggcagttttccgccttctgcttttctaaataaaaatattaaaatatttcaggtcagcaaaaagaatcatggccaatttaaataaatggaaaatactagtattttaaatttagcaagaaaagaaccgaaccttgagaacctacctgctttgcctctgtgaaacctccgaaatatgtccattttgcattgtccaacagaatccgaatacgtaaagaagccacaaaagaccaaacatcaatagacctctgccaggaactgtaattttcattggcccaactgaaaccttcatctgtggctaaaacctttagctcttccaatgaccttctagatttcactgtcttggtcaagcctgggataccattttttctcactacctttgaagttgctgaaccattcaccaccttattctctaacattctctttcttttcactaactcatttgtccctaccattctaacagctttaccatttgttccatactttgaggcaggcatttctgtctgtcgcattttcaccggtaacctataaaattgattgttccctgatgataatggatcacatgttctggtcctttcattctttgacaatttgttaaccgaaattgagcctgaaaaactgagattgtccagtgttcttctttgagttgccaacttcgtatagtgacaataacaaccctgcattgccattgtttctgttgtctaagatgagatgaagtcaccttaaaaagaaacacaaggataaccggtaagaaaaagagatagcacatgccgaacaccaacaagatcagatatttgtgtacttgatatttttttatcggcgaatgttaatttgttagttttgttagaaatgttaattgagagatttatacccgcgatctctcctccctctcttctcccttcatccttccccaaccactagattaaccttatatctcctaaattacttgtgctacagttagaaatttcagaagcttgaattatagtgctcatctaaaacgcgtatatttttttttattttgacttgattttacctcgtgactagtcgacaaaggtagttttaattaaaaaaatacaattccccccaccaattttgtttttgcacagaaggaatagaacttgaagtacgagatgtttggaattagcccacatgcagattcagcacattatgttaaggtgaaaccaattagattataaagtgtttaaaaagaaaacagagggagaagaaaaagaaagcgggtcatccaaaactctgatacctaaaatggaaccagcagcaagatggtagcctcatcatatactacagttgaacttggtgaagcatgattttgacggtttcgaagaaagaaaaatgttgctaatggggaatatgcatcatgacaaattaaccaatcaagcaaaaaaatgatggattctattacagagaacttgtcacatattatatcaggcataaaaaaagcaaaatcaaacaaaagatactgccaaccatacttagtgtttgatatcagctatttcattgaatgaatatgaaatgaccagaagcaattagtagtcgtattaaacacgagagacaacaacaatattgtataaactcaatatagtaatttacaacaacaaatattcatttggtcttgaacaaattaattagttgagcaacttgcatgaaaattgaacagatttagcatggaatcaaaattattgtacctgttgcctctttacttgagcgaatacagattcagcaaacctttccaattactagcatacttacactgagattttttttatcatttgcctagtaccaacaaccagaaggaaaaaatgttgttatattatacatacgcggccaaaggcatagtaagaatgaaagaggtacaaggatgttgttgcttgtaagttttaaatgaaacagtactgcaagtaactgacttttgcttcagtttcggtgttaacgacaaaaaacggaaagagcccacaacacggtgcgtgtaaggctcttctatctcttgtagtttttcaccgtttgccattaatcactaattgccttcaatttatgtctaagccacaaatatcataaatgacaaaccttcaatttattcttctaactgttaacctaactatgccacgctattattcttttcaaattcaaaattactatcaaattagtcttttaaatattaaaatgatatcatatgaatcttttatgtgtctcactcctagaataattatttattattttcccacggtacaaagcttcatttttgtgaaatctttttctttccactttcttcttttttatatcaacaacatgaaagtttgtatattttgttaaattattatcataaatgtaaaagtatttttgtataaatatatttatacaacagaacataaatatatttatatattatagaacacaagcattacttttttttaaaaaaaaaaaagtcattttcaacaatgatagatacaatttcttttaagctttcaatatcacttaaataaataaataaaatacttataaaagtctaaaaatcaatacttaaaacgtgtatgataaaaatatgtttaccttgattttttttccttttagaattatatcttataaataagaaatctatattatcagcaatttatttcaaagacatggccccacgaatgcattccttattcaaagcttccactccaaatccaatgcactatcggcatcacgatttctcaattaccatttaccaagcaatgtagtcactcacgtattgatgcattccaacagaacattacgaagcaaatatctcctactacctcggtccttactttcagcaactggggaaaaaaagaaaaatttcccttgcagattacactcaccatatccctcactcaatttctaataatttatattcatataatcatttaaagctaactttaactaacatcaccgaaggctcaagctcaaccgcggaaattgatagctaaattaatagagaacaatttccattcattcaatttcaaacaacaccacaacaaaattaaaagaagaaagttaaaaatattatctatgacatactctttgtgatcgactaatattttttaaaattattaattttggtagatctcatgtctaaatcaaaagaaagaatctatgagaaagaatcaatgataagtgtaacccactaaaattaaaatagatgatttttaataaacgagtatttttgacagaacgagtattttttttttttttttttggatttccctgtcagactccgaaacctgaaacacgctgctatgtctttaggtttgtggagcccattatcagcttcaaacctctcctctcatgcattgtgtgcttcaaaattcaaagtcactggaaagagtaaattcattccgttcaaattctaagaatattttctagtcaaactcataatccaattttatgaaactagtaatctaactatcatttactttctaatttcaccaattcaggttcataacaatttcagatttccatcttctatctatgccattaatatgctagctaaatggttcttttatttttatgcctttctttatacgcctgtgattgtgaatgcttgctgttattagtaattattcttttctaggagttttctctttgttccttttttatctgatgtagtttcgccaactccttattgtgtttagacttaggaatgccatttaggtcttcaaatgctttgtaaatattatcatgattggtttcaggtattttgatttcaaattgaagtttagaagaaaaatcaggtcctgtaattgtaaattctctcttctctattatgagtgcttgtgatatggcatgctagtgctccagatatggggcctgcctttttaatttaagttctgagaccaattatttgtgttttgtctaataatcctaattctttgtgtaaaaagtagctgctagaacacttgactttaagtttatttttttaatctcctgtatatagaaagtgactgtgttcgagaaatcagtggaagaaatagataatgatgacaagcatttgagatacctgagttaggattggtttccttattttcaagttaatgactttctgttgtgtggtaactcataggcaggttgggaaatcactttattagagtatatggttccaaatgaagggatgcatgctactaaggtgtacataagtaataagaattttcaattgagaaaggatttaactttattactaagaccctcctgcaagcataacatggataatcagaaagtatatacttactacttagactgtaaccgggtggtacactgctatcctggtttaacaacactttacttgactgttccgctttgtactttttagttatgaaatttctcagagaaaaaaatcttacttttgcaggaatggtgggtttatctctttgagaaaaacatttcattcctcaagatcttcgttgtgatggtagaaagagattgacatatcaactaatctctgttgaaactgaagttattccccgggctaggctttaatcagttgacatttggcagggtattctgattattaaaccctggcagacattatttttttactttttgctttaaatagttttaaaagtggagcaggtctattttctcctagagtgaagattatgcttactaccatatgctttcccttccatgttgttgcctctttttaatatagctgttgagctcttgtttttttcccctcaggtgctggaattgacctctcctggcttattctcgttgaaggaaaaatttgttgggatccttacattgatgggctttgttggtgattttagtgtcatcaatggattttagtagtaatgtgatttactataggccaatgcgattacgcgttaagctttggaaacgagttagggtagtgcggagtgcacgcttgttgagccaacgcataattgaccgcgattacggtgcggggttccaacgcataatttagtcatgttgaattgatttcttattcatgtgggggattgttggagtttttgtttaaactccatgggttatgaataagaggtggttaacaattcaaaataataactacttctaaccgctcttgggaaaagttagaaaaataactactcccaatcgttctgataaccaacggttacgatggttcatcgtcaagagttgcattgtttggaaaactcctatataaggagtcatttggcctcagatttcaaatatacgaaaatcatactttctttctacattcctgatctgttctctattgccagaagcagattgttcttcaaagaattatcccaacaaggatttcgtgaacccaggcaagaatagggtcgaaatactttgttcggaaagtgtacgaacacgattctttgaagttatccaggattatcatacccaaatctctaacaggcttgttgttagttcagatggaaatttgttggatgctctaggcgctgccatcaaggtacaactttaaacgaaaatagaataatatactataaaaagctggaaaagatgataatgatggatttctggctaaaataattagcgtttcagagatcatgcttttatgttgatgtcaattttcaatgctgtttacttttcaagttttcttgttcatttaaccttagtttagctattgatgttacaaacatgccatttgggctgtttgaaatactgcaaagcagcacgagcaacacaaaaacacgtaagtttaccatttacaatttttgtttaatagcaaaatattattctattggatacaaaaactaagttttatcaagaggaatccagcattacatttttatatattacttttaactttattattagttataagttaagtaatttttaattaaattgaggtttaagattcattaaattaaatagagaataactcactttgtttaataggccgtatgaattttaattacgttcaattattctataggctctttaactatttaacaatttttaattaggttctaattttttttttcaattggatccttaaaattatatttatttttaattaaatttttttgtctaatcgcttttaacttttttaaagtcttgctaccaagtattcaattgaaactaataaacagaaagacattgttttgaaaattattatgaaaataaattgctgctaacattaaataatgtattttttttgtaattttttctaactttaactccttaattactattaaaatacttgttagtatttttttttctctttctattatataagggtttttcataattatctatagcatctactaattatattaaaatgaactgttagtattttcataacttcacaaatacacttatttataatatcacaagtttaacctttgattcttcaatgaataaattacattacacgcaacacgcctaagattttgtaaagttacacagatcctcttattttttaatccttatactaaccccttaattatttttaaaagtttacgttgacgtccccttatacgttacttagattcttttaattatttaaaaaatattacatcttgttcctatacataagaaaattgagattattataaatgttaaaaacatataaaaaattgtataatttcataaaatctcaaaaataattaatgtaatttacttctttttaatttaatggttaactatagggaaatcctttattgtaaaacccctcaaatttaaatacataattcattttaatattgtatgtttatatattttctcttaaaagatttttagaattgattaaattatgcttccaaatattatcagctaagtatatttgaagatctatatataaaaaaagaaaacaaaacatctttgagttttaatatgtgagaattgaatacatattaaaaggtttataataacttatacattctacttaattaactaaactagatttttgacttttttaattaagttcatattattaatttttcatctcctaattaagaaaataattcaagaacttaattttaaattgctaaataatttaggaacttagaaagtaatttaacttttagaaaaaacaagcacacaagaacagagaaattaagaagaattaaaggagaaaaacattgtagaagaaaaggtcattcttaaatctttattattatttaatttagagtccgtagaaaaaaacaattatggaagtaattgaataattgatgacttcctcgacggcttggctgtactttgagccgcaacaggtcaatgacaccgccgtgctcatggaaaaatgggacggtgattcccctgtctccgtattagaaatgttgaatgggaaagtaaagggtcaagaaaagaaaaccaccaaaatgaaatttcctcatcactacctttgattttcagtttacataccttccttccttccatccattctccaaaattaattatatatacgttgtttgttcctatcatctcatctcatcccctcattgtctgcaaatatatatatatatatatatatatatatatattacaagagaagagctacacaaccaaatggaaggtgaaaagattgaattgctcagtggagttgaggatcatcatggaggagtcgttgtagacgtccaagaccctatggattctacgctcttctcttctatattgcaagcttcaatctacaagtggagccaacagggcaagaagggggtctggatcaagttgcccatacaacattcaaatcttgttgatcctgcagtcaaggtaaacatacattttattatcatttatttgcctaagcctaactcttaattaagaagccattttgctacaaattttgtgctcctttttcaggctggatttaggtaccaccatgctgagccagattacttgatgctggtacgttggattccagatactcctcataccattcctgcaaatgcttcacatcgtgtcggtgttggtgcttttgtcatcaacaataacaaagaggtaatcttttctttatttctttttcaatttgaagtccaagctttgaagcctgaataaaggaggaaacctttgaaatgatcttgtttcatttgacaggtgcttgtggttcaggaaacaggtggcaaattcagaggcacaggtgtatggaagatgccaacaggagctgttaatgaagtatgtcaaaattattattattatttttggacagaaagtatgtcaaaattattaccgaccaaattattaaacttctaaaattatcttttgatatgtttcaaatccacttgcagggtgaagatctctgtgaagctgcaattagagaagtcaaagaagagacgggggtaagcaagcaaacacataatttatagtttagagtaaattacattccacttgaaatttgtcaaaataatagcaaaccccgaactcaactataatttacaatccactttatatttttctctgtcactaattatttagctaacactgttatgtatttttttaagaaaaaaaaaacaatatcagtaagatttatatacaacattttttaaaattttattattttccttacaaacttaatttttaaatgtaaaaataaaataatttaatgaatatcataaaaactggcattcatgtgtatttaatattttatcaattatcatgctttagtaaatatctaatatacgattaagacccttccttttttttatcatgttcccttgctcttttgcttataatcaaagactgattccaatttgaccccaaaaataaaggcctatgcttctctgttttgtcaaaaaaaaaaaatggattttcttaatttttctcagaatttattccttacaaaccttaacctcctctgaaatcttgaaatttcataattacactatatttttatgcatgtgacaatataaatatttaaaattaaataatattacttagtaaattttaattcaaattattcaactaatatcgaccaagttttgggtttgctgttttgacaaacttggttgtaattttatctatagcttatatattacatgttttttggattgtttcaaagtctaatgccattactttcattcttttttcagatagaaacaaagtttgttgaagttttagcattcaggtaatatgtggtgtgaatgcgtttttttccacaaataaccaacatactgctatgcatataatttacactctgaaatctgaattaatattgaatgtggccttcacgttcaccgacctttatttcttttgtactaggcaaagccataagtcgttcttcgagaaatcagatttgttctttgtttgcatgttgcaacctcaatcgtttgacattcagaatcaggcttcagaaattgaggcagcgaaggtatatattctaatgtcaattgagaatctcactaattttcagttgacatgtctttaagtataactaaagaaataccatattattttcacctttcactctgttaattattaattactcctaaaatgaaaataaataacaaaccaaacgcaccctaaaatgttgcttaagttcatacttcattttaaatctctccaagtcaatgaaggctacaggctgataatctatcaagacattggtaccaggaaactttgtaatttctgtaattatttaactggtgtctcgtttttttcattcagtggatgccagttgaagattatgctgcccagccttttgtgcaagaaaatgagctctttgactttattagaaaaatatgcatttcaaagctggatggcaactacaccggtttttctaacgtgcttacttgtacatcttctggcaaaaagacccatctgtattttaacaaccgggatgccagccttttgttagcttccaaacaggagcaagattgacatgtatatgcttgcaagttgccgttacatatacttgtaaactttgtggaacaacatttgtggacagcaaactctagtagacacctagatcctagatagataaagagagaaaagacagataaagtatatataatactttgtgataaaaagagaaaaatagactgaaataatagatgttaataaaatgtttgatatatagaggtatttatatatcatactcaaactttatttgttaatagtacttacttcaagctgtatacgtaactttatttgttagtactttttccaggtgcatccggaacctgaattttatgtcttcaataaggataaaatatggtgccattctactgtttgttaattttataatgtcatctattattgtgtagaggactgccgattttctaattcacttcttagagccgagagctaaagccaaaatattaagttgaacatatacggcattttttttaatggggatgatgtcatataagaaagttgtttttgaaatctgggacccctaatcttggatcagaaatttttgaggtggaaaataagtgtaggctagtagaataagatgctaaaaagaacatgcacttctgttagtacgaggattttttttctggtgttttgtacggtttcatccgaaagtctcaggttcagaagagatggactaggattctcagcatttaataagtaactgtaggtcatgcagtaacatccgtgcagtggtgcagttcaatctttcacaatccattcttttttaattatgtttttctatcaaaattttattcaagtagaaatatatattaatgattgagaattgagattcatgcagttggaaaagaaaaaactgcaggggatcttgatcccgtgtttatagcgctgatttggcagctgcagacaccagactgagttactttaaaatggttcggttccgagacttgaaaattgtaggcacattgcagtgatggtctcttttataaatactatataagtgaaactatagttcaaagttcccattcgcaattcttggcaacgttttctttctcatatctgcaatatttccggctatacagctccatcctggttttgcttatagaaaattgtaatcttgagggtgaaaagaattcttggcaacgaggatgtattcaccctctgcagcacattgaactttgctccctttgttcaccgcaaaaattatgtaatgaacaagtcaaattctttggttgttgtgaattgaccactagatacgggcacgtgttacatgctccgcgagttagaaaatctgtccgtacccgtcccgtgaattcacgcatatcctcgaattcaactacctgtggatttttgtataccagcgaatacccatagatatccatgaatgttaaaaaatgaagacaggtgaaaagactagtgatggtgctgaagtaaatttgtatctgcatataacgatatcggtttacactatccgttgtggaatgtaataaagtagctaataaagcagctacagatctcctatacagaaccgattaggactcgggccaaaggttacattcaattcaatacatggatactgggaaggaagacgtcgcactagcactaaccgagtttctctaaaatacacactagtacaaagtttcttccaatctttagccatcaccgattcaccgctgattatgttctgttctttgcaaatttgtataatctttgtctatgcaattactttaatgactcacttaatgtcaagaaatatgacactcagctgcaaagttaatgggagatccttcatccttctcacccccctaacacgcataaatattttttttgtcaacttttcgaaactcagttctattttgtcaaattctctgtagaagaagctttaaatcttaacattattgatataaatatgaaatgggcttggcctaagtgtccaatatttagcttgattaataatactgattagtctcatatagtgatttgatcaggaccatacatcatgtactggtttggttcaggactctgataatttctgattttttattttcatttcagttttaaattgtggatgctatcggtatcggatttgaaattacgttatgattatcaaaactaaaaaataaaaaattgaggacaacttgagcagctaccgcaataattgctgtttagaaagcctccaaaattatgatattgcgactaaaatttttaaaccttgatttttcaatttcttttatcacttttggaaaacaatatctccttgggattaaaatgctctgccactgcataatcagtataaggtacaagtttgatcgatgggtgggccatatttttaaaattctatcattcagttagaggaaaatgccgttaaacatttaaataaaaaggaaactgtaagaaatttaattaaattacagcaaaaaaaaggttacctcgctatataagcttctcttaattcaagttgctactagaactgaaatagtgataagatgataagaggatatttaatgagaattttttaagttattttttataatttttatattattttttttattttcaaagtgtcatatcattataaaaaaagttatacataatttttctttaatgatgagaaattctagaaaattttaaaaaattcatatttttatattttatttaattatggtttaattataatattattatgggtcagataaatattattttttattattaaaaaataatttcttataaaaaatacatatctattttcattatcacatggacttgttataatagagaaaatatattatttttgagatacatatcttattcacttgaaaaatccgattgaagatgatttaagtaactcataagcagtagcaagttcaaaccttaagccaatgtcgtattacagtacaaaatccgagcttaatgtcttagaaaattaaaatatattaatggtgtccgaaaaacattgataagtagcataataacaataataaagaaaacatgaggggcgaatattgatatcaaaatctaatgaattgaaaactgtttatatgcacacatcccatagctggcaggtagcacaaaccggatctacccacactggaaaaaaaggccaattaaataattcggaaaacaaacaaacaataaatacaaaacctataatactaacagattaaaaaaaaaaaaaaaagaaagaagtacacatggcctcctacatgtgtcggtggcagcgttttatttccttcacatatattaaagaaagaaaagaatcttaattgcaatgatggttgaccacaagtgtatagtaccgacactccataatccatatgtatgggtgtttcatagagccaaaaagcccataattaaaccgaagaagaccatgaggaatctcacgtgcaatccgcttactccattgctgtcttcatcggcagccttctgatcttgggaatcatccgatggtccgtccgccggtgcatccgccgcatctgaatcggcggcccccttcttagcgttcttcttcttcttggcaggcttaggcgactcggcaggtgcttggtcttggtctttggcatcgctgggcttgaatagctctctgggcatcaagaccctgtttatcttataagccacgaagggatcttgatctatcaatgtccccactatgctggccgtgttgactttggtcttcaggttcacgtcttctccttcactctgcaccgtgaagtcgtacttgttcgctccctcggtggccagagtgttcatgatgccgttgctggacttgagcatctgcagggactcgtaaacgggagtcgcgtggtataacagaagtgaaaccttctgtgcttcggtgaggttcttgtactttggcgcgaaaccgctgacggcgctgtcggtggggcagaaaaccgttaagccgccgtcaacgttttccttgaaagatggaagggctttggagcctcttagaaggtccgcgaaggccttgcagccttgtttggacataatggagatcaggtcgatgtccgagggggcggcggtgggggcctcggcgtcggcggagctaatgggggcgctgatttggaggacggagatgtagtagggcatttcctggacggatttgacgtagaaggagtggagggagccgtcgttgtcttcggcggcgaagccgaccttgccggccttgaggttggtgatgttgacgtagccggcggtgccggaggcggagccggtggcctggaacatggaggagacgagggtggtgctgttgttgatctggtggagctttttggcgccgaagtagtcgacgaggatgtggagagagaggacgtttttgatggtggggagggagaggtgcttgtcgaggagggaggacatggcggcattgtcgagggccaggacggtgatggtctggcggcggttgatctcttcggccaggtgggtgagggagaggtagtggttgaaggtggagaagccggggtgtttggccagcatgtgcgtgatgttgtgggcggggacggtggcgacggcggaggaggctaagaagaggaagaggaagagagagaagaggttcttcattttgtttggaggattagggaaagaaagagagagggagagtggagaatggagaagagaggagtgtgtgggtttataactaaagcagcatgtccgtttatgaggagaaggcatactattaatgccagcttgggattggcttcgagatggaccccatcctccattattttgacaattctattaagataactaatttaattggccccacttttttataatatttatattataatacgtgtttgagtttttaatttagaagaaaattaataattagaaccaacaaagttagttcattcggtaagaatcatatccatatatcaatatgagaattttttgttaataaacaatctataaatacatttttttgatgtaattgagagaaaacattttcattaaaattagttgttcaaatttcttggataaaagttaatcatcaaccaaatcaactaatacttccgacaaaatgaaatgtgaagattagaaagaatcatggatacataaagttttgaattagtagtatttaataactttttgaagagtggtataaaaatagtaattcttttgaagaaaaatagtactcttgtgataaattatacaattaagagagaaatatgaaattgtaaattatataattaagaaagaggaatgagatataataaataagtaagtaaaaagtattgtataaaacagtgtatgagatagtattatatactctttctggaatatatgagatagtattaaagggcaaagtgggctaattgagcaattgggcatccgcatcccaccgacgctcttaggccccactccccactaatgtacatgtcagtttcacgatttttatttcctcttttaagtacagttgccaatatttgtttgtattaaataaaattatcatttaaatatatttttaatttcgataatttagaattttttattttttataaattattttttaatttttagttcttataaattatgtttttattttattttttattcttaaaattcgttaaatagtattttttttattattcaaagtattatctaaaatattttataaaagacaatttttttttgcaagaactaaaaattaaaaaaaaactaaaaaactgaattgcaagaaaaaaaattaaacttaaaattataagaggagtttggaatttggatgctcgctctctggtactattttcgatctaaaagtgttagtgttcaaggttaacatatacatattgaggagtatttaataaatttaaaatattgagtaagtgaaatctataaaattttataatttttatttgatgatagaaaagcgtattaaaaaaaaatgttacaaaacgtttgttaacgatgaggacaaatatcacactgtcctgtacctttgagatttaatttgctgaaagcattcttgacgttgaaatttttctcaataaaaaaaacaccaaatactattaatttacgtaaatccaaaatgggcaaaatcaaattttatcatcgcactagcaaatctacaatcatgtttgcatatgtttttaataaaatgtggaaataaatagaataaaatatagcataaagtgaaatgaaataaaattataatgttattacttaattattttttatgaaaaaaaaatatttattacatactttcagattaaaaaactaaaaaatatcaaataaaagaaaatatatttcatgaaatagtgttttaattgttcataatataataaattttatgttattttgtttaattaagagattatttgtagttttagtttaacgaataaattttatgttaatttagcattaatttatgcttcatgacgtgggactttaataaagttgttcaaagataagcagcaaaaacaactttttttagtaaaaaaaacataatagttttcttttgatccttcaacgtggttattttataatatagtatgatcataaattttaattaaatataacatttgatttgcggctagctgctgagtgaaatgtattttttagtaagaatttgacttaaattctctcaaaaggtcatttcattttaaaatatctcgtataatttacatacattttgaacaataactgagaaggattcaagacgagtgatttacacttgtatgtttaaaaataaaaatccgtattttagtttatatttgtaaaggtaataattttagtgtcggtgttcattctcaataaaaaaaaaatatttattttttgacaaataaataaaataaatattaaaaattatatgacttttttagaaaaattatatgaaattaataaaacaaaaataataataaatagtataacatctaacttaattaaaaatatataaaatattttaaatcctaattataatatatatgtataatatacttgcatacttcgcactaattatatgattaaaaaaatatgagtagatacatgaagtgattcagttattatagtattaatgtactattaaaaaaagtattattgtactcatacacttacttatctacaaaaattctgtgaataaagtcagcaaaaaaaatttatcatatctagattaaaacctacatgaataggtaaaaatattatccattatagacaatttttatagatgtgtattaaatttaatcatcatccttagatagggtactgtaatgcgagccagataattggcaaaaatgtataatatgtgcaagtgtgcaggagcccccatctaatgtatatctatgttttaaattgtgttttgcgtaatattaatgacggcagtcctctggagaacacgttgaaattattattggtggcaaaatcatttataaagaccaaaatcttttgccagttgggacaagtttggctcaatattccaataaaccagttcaagcattttatttttcctagtgaaaagggctccatcattgttcgtgacaaataaatttatgttttacattggttgatacatagttgtcaccctcatccttgcaataattaaaggccgagccaccaaatttggaataaaaagcatcaaatagcatcattgtggggcaaccaatagttgtactgtttcaatatttaacagtaaggttgttgctcaattaagaacggagtaaacagtgtcttactcaaaagaaagttataaaagctacccaaggacatttgattcgtttctttgtttttggttttaggataagtaaacaaagttaaaattaactgcaacaatgtcagccaaaagagataaggtgatgctcaagatttaagaaagtttgaacggaacaagccagctacaaaatacataagaaacttgtatgctagatctagcttctacaatgaagcaagttaaagcaaagttggtttgatatataataggtatcccactagcataggtttatgaattgatgcaataagttgtctaaaatcaggtaattatggacccaaaggggaaaaaaatgaatcagttatgtttataagatgacaactagatgtacctccattcccctctagttagtatgctgataccagaaaatataatgtggaattcaagtacgtttcaatttagggcaaggttcgaagttctgtgtgagaattcgagatgaggacatatgaatatttgtcacagcatagatatggaggagcaagggcaaggtacggttttttatgttttgggtccaaacaagcacatatttaaaaggtgctattttggtactctagatccatgatttgctaggcccagttaatattaaagaaggagaatcataaaccgggtccaggcttcaatgggctggctactcaagttcaagctatttgggttataactgaagtctgaagataatgaaaatccataccttttcaccaagggaagcaacaacttaatgatgccccttgcaaaccatttgtacatatagtcatttgcgtaaaaaagtgaatgttttataacacattatcaaaattctcactcttaaactctctaattaattaattaaagttaaatatgttactataaaaaaaaattaaatgtttttaatctttgcaagtaaaataaattaaatatactttatatcccttaaaaacaaattttcttgttaatctctcatttatacaaatatgattgatgtagtcattgtcctttataataaaaaaatcatttaccattgatcctttatttatagaaataagaccacgtgtgacacaattttataaatactttatttttgggatttgagaatataactttattcttgaaaaagaaacacaagaaagaaaattcgactactctattgtcatgaagagggatggaaataggggatgttttgccactaatcatgaatttcatttgaaaaatgtttaacataccatattataatgtttattacctgttttattctaaccacggagcttatagaacatccttgctttgaatccaaagcttatgcgtcaatatcctttttatttgtagtatgaaagctggcattcgaaggattgagaaaattcaaagttaccaattaagtgacgtatggtgataaacgaatcgtgcatgtttctacaaaatggatcaaaattcaaaccttaacattccttgctaagaagatgataattcgtgaccatacttctaaagttaattacataataatgttttatgcctatggtattatcgaagttagggaaaaagttcaactttaaaaagagttataatgttgatttgatgttgaaaaaaatgatttaaagattgaagggaaaatagtaaaaaaaatcatgagttcaaatcttcaagtaacattaattctaacaacaacaaaaaattcaactttatttatgtgtgatatgtcatgaaatagatgataagaaagctaatcataaaaattaaagttcatccaataaatatagaaacatcaagtttcattcaaaatattcataattatgtccattttgaaataatctaagaacaaataaaaaatacatttatatgaaaaacaaattaaatatgatacaattaattattgattattaaaaaaatagttagtgatcacacataatcattttaaaaagtcgtatagatatttttttaaaactttaaaattgaaatatgatttgataatctgtatttatagttcttattttgtatagtaagaagagttttgtttgatatatttgtgtgtgtgtaaaagtttaatgtatattccatttttggaatgtataagtgagagagagagagaaatgattgacgtgacaaatatgattaaaaataataaagaaatataaaaatgagatagaaatacaatgaaagaaaagttagatgtaaaaatacgatggatatcttttgttgtgttggggggagcatagtctagattatattttttgtaaatggaggaaaaatagatgtttgtggctttgtagcatatttcattttcgggaggatgtctctatgtattgccttttcgaaagaggtgaggtattctgttgtgagcagatttttggcttcgtgtatggcacttcttgtgctaaaactgagacatgattataataaaataaaaaatgttggctttaaaaatatatataataacctatatacgatcttgtttaatttgtattgtagttgagatgtgaatccctaaatacaatgtaaattttccaaattttcaatcactgtgttagcattcaactaagacccattattaaaagaattttataacaaacttataggtttgattttttttaaaaaaatcttttaaagattttatgattatattaaattttaatttgaatttataaatactttcatcttaactaactatttttaatcttaaattcgttgttcacatgtttataaaaattccttttatgattatataagagtattctcatattattcatactatatttatatttatatatctttgagtttggtgtgtaatttttttgttcttgaaatttaaaaatatttttttaatcactgaattttgaaaaattactttttatagttctgacataataaattgatattttgtgataatttttaagtactttatgacaaatttttttaacactttatgatagtttttaaatgcaaattcaaattaatcaaaaataaaaattaatttaaaacaactaaaaatcattataaagtgtcaatttattatgtaagggacttaaaaaaatgtaattttcaaaatttagggattaaaaaaatagtttttaaatttcaaagactaaaaaattacacacctcaaattcaaggactaataattaagccatatatatatatatataaacaactattcaggcagcaacttgcttgtttatcatttgcttagttcaaatttgttattttggccttttggctatcatgcttctttatttgaccgatcttattgtgtaaattacaaaatcatattttatttcaaagtcactctcttgacatttttgcttacaatgcaaatgcccgtagaagactttaacaataaattaacctaaaaagagagaatataaaataaaataaattttcacaactttgccaagaagcagacaactatttaagttgcttattccatagggcaagataatgatgttttggcgtttccccccttactgagtatgcgtcacaagcccaattaataaacttcataacaaaatatgattcttctattttattgagagaaataaatagtatcatggattaagactaacaagcatctatgtcttttaagtttaacggttgatgaagaataatagattttcagatgaaattattaaaaaaaccatttgatctaataataaatgtctacaccttttaagctcgttatttgagagactgtaaactataaattagaatgataaagataaaggtttagtcatagtcacaaatatgtcctttgatggacctaactctaatacataatcaagtaatacatgtcatccctaaattagtttacacctttacatgattaaggcacaataaacacctccttcctttcactaatacatgtcatccctaaaaaagggcaagaaccattacaagacgattagaagaaatattctataaataggtgtgatttgccttgatcatgacaagccatgcatagtagaccttattggatttcttgagttcttaactgactttataactcctcaatgagtgtgttctttaacatgaacatatgtataattctccattaatccctttgacaattggtttgatgcaatatctaagagcaacaaatatgttcatttcttaatacaagtcatgttaacgtgattagtatgttgaacaacgtacaagtaataagaatttatatatctaatgttttaagactttgagttagatgtgatgtccaatttatttatgtgattgatttatgacttattggtgaagattttttcatatcatttcatattttattacaagcatgttacactggatggagcaacaacatgattgattgattgagcattttttcaatttttgagactcatttattttccttttattttttcttgtcatagaaaattggcttattttttcattttctttccatcctaaatttactcaatcaaacataaacaccttgtttatattaaattttttataggtgagaaatttcatgaaaataacgaagattgagaaaggatttttataacttccactacacaaatttgacggagctcccaattttattaaaatgaatgttcaaatattaattcactcgtagagttgttgctcaattaattattcagtagttggtgacgtacatgtgggaatggaggatatctagttgattagctttatgaaggaaatggggtctgaatcaaaccacagaacatatgattgtccatcatgcatcaaacaactaccaaatctatgctagcatatagtaataactatgaagtaacaaattttacaaacctttccacctgtttaaaaaaaaaactataaactttgaagataatgatccttgttagattattatgtaatgtttagttgacacctagcgagtaactgtgaaactattaaagtatgctaccatctgttttactttgagcttgttatcattgattggatgcttaaaaggagatgcccacttcctccataatttgctctcacgagctttagtggattaagacatgctcaactagtacctattatgctgactccttttggaaatataaaacaaaccacatgggaaggtagatacttcggggacttggacatagaggccttgctaaagttgggtggaattgatgaagggcacgcaggagctacttgtataacttcaaaaggcctaaacaagaatctattgatgcttttacttagcttttcacatggttgtttgaactttggaatcttgggatgctatggttgcatcttaaattccaaaagcagctatataatggaaaagatccgtatgtatctactttttgtccctggagaatttatttgggtttggcaccctttcactaagcatatatactttataggatgcatcaatgttaataaccctataggagaacaggagaagggtagaaaatgaaagcccttggttaattttcattattattatacattagaaaatgccccttgaaagtgagtttttgcttaaaacgattaagagtgaaataatccttaatttaataatccatcatgattttgacgtacgtattaaataatcttaaaaataaatataattaattttacttattcactttacatacatgatttttcccttataggttatagccaataggtctacatctatttgaggattgaagcgactataatataattatttggtacagctatgaaattgtagacggaaaaaaatggttcaaggggccaatttccaaatccctgcagaaagagtgctctaacataaagccatgatggcgcaatttcttgttcgtttcaagggagcagacgcattagaaaaagataaaaccgtcgttggattcgataacaagagcctagtcctagtgaattctaatacaagaaagccctctttatgcattgtttatccgatacgatgtactatatgatataaaacagctgattacccattacttgtaactaaataaaaataatcacaacatacaaacatgaatatgaaatacagtggttggctcacaggtaccgatccctttctctatatcctttgcaacaaaaaataatttattcctcacaaggaatatgtatattatactaaattgacaatagggttgaaatagaaattattgatttaatattatattttcataaactattgatttagtgtcatattgttttctagtatatcgtgaaattgaaccatcaaacttcaaccaagaggacggagcaggcttttatttttctattcatgggatgggttgtcgatgtgcagtactcttgtcattggcaaaagaagtgcactagtattgaaatgattaacctttattatgcaagacaagaagttgcaaacaaaatagaaaaaagacaaagctaacatgtcaaatccaatccaacaactcatgttttcctgtatagacaggaagcacaaaacaatggatgctattttatgattttcttttttctttatttttttagaagatgccattttatgagtttagttgacaataatagtaacaagtagcaagttacgagcttttgacttcaataccattacgctgaaaacaagttcgtttagctggtgtaatccattatggtaccgaaccaatattctgtagtgttagattgctttgctttacaaacagaaatttaattaatttaatttaaaggaccggcacaaggacaagaaactgtgcaaaaagtatgcactgtttcattagacagtgtttggttgttcctgatagcaggggaacattctcctttaaaccagactcataataattagtccacagcggaatcttccaaattcattggagaataaaaccctgtatacttgcttgttcagttgctttaaggcagggaaaagtggcatcctcagagagagaaagagagtgagaggctcatcaaatattaaaataaagcaaaaaaaaactattttttttttctataacaacaatgccactcttctacctagagtcaattcctggtttgctttcaagggtttcttctatttatgcactgaaatgggtatgccatattgctttctgattctttcttctctatctaatggattcgtgctgtctcgcagctgagcatggatatctactctactctctttctgtgctgactgctgaagtttttgtatggtattttgttctgaggatagtagtgattgcgatcaaaatctgggtttcttccactttcagtgatgggtagtaacagcagaggaaaggatggtgaaggcacttctggagttaaaaaggatgagtacgaacaagacatcaaatttctgccacctgaagtgctttatggcaatactaatggattcacagatccattggttcagttaccttcacatggccctggaccatatgagccaccacctcccttgctcatacaaccccaggtcagagttagatgatcctttgttaatgtcttttattgaaaaaaataaataggacaggtcgtgtttaatgttatagttttatacagtgtatccatgaggggaaagaaagaaatttgatcaaagcagtaagaaataagcatcctatcaaattgggatgcttctcagccttctctagactgcttttaccgtttaatagtgatttgtggaattgggatggtacaactaaaatcagattttaggttatagggcatagatcaaagtaatctttcaagttttagaattttaaggtggatttaatattttgaatactaattttgtttatcattcatatgggaaacactgctggtcctatagggaattgttatgagatgtattggccgaagaaatttataatgagacttaatacatgcatgttattgcaacattagttcactcccaggtaatatatataaaaatttaagcaattacaataaggatttaatgcttttaatctgatgaagaatgtacaagttaatagttagtgccattgaatgaagctactttgacagtaaatatcttgagcggcacaacacaatgaacgtttacgttaaaacatcaaatttaaaatgcctgttttcaaggtccctgtggctgccatgcaaatgcaaagaccagcagcggtagcgcaacccctgccacaaaatggatatgtagaatctgtgattcatgaaaggctgaaaagtgtgaggatcacatggaaccatgcagccacgaatgttgctattgcaggatcatgggatagctgggagaccacgtaacaatctacacaattttaaattccaactatagttcttgctcttacttcatcttatgatatgatgaactttttaccttgtcctgtcagggagcccctgatgagagtagatcaaaattttgtcattgttaaaacactcccgataggtatctatcattaccgtttcattgtagatggctacttgacacatgctccagagttcccatcggcttctgatgattcaggttatggctacaatatattggatttgcaggtaatttcatggtttactttattagtttatttttcaggaaatgctgatgatcatgttgattacatcttcaccagtgttttcttttactataacctttaacacgatcatcaattcagtcgacagtttggctttattttgacaatatttattcagcagtacttactaaatccatttagtcacacgttgaatcattttttgtcaaaatttgttgtctgatgaggaaactcatcatgcctgagtggatggtctcatactaaactagaatagactatagagctgcatgcttggcacagaagtagaatttcatatggcatggtagatagaaaatttttacgttactgtcccaaccttgtttgttaattgctcggtgcttacgggaagatttaggaatatatgtgtcctttctaatttacctaatggtagttctggctgaacaaaaaaataaaaaactaatgctagttctgaattctgactctgactctgatctcacttatagaataagtttgcaagttcatagtaatggattgtaacttttctttgtttagattgatttcaacagtcttctatccattgctagaaaattttgtttacataatagtgtattgaatgaattaacatcccaaaaatatggtcataacttacaatcccttcaactcgagcaattcatctatatatacaaagatagcctcacctagcttcttgattaaaccatttttacaggattatatcccagaaatagttccaaacttctccgattttgaagatcctccatcaccaccatcgagttatgataacacatacttaaatgaagaggagttcagcaagcccccgccagaattaccaccacaactaccagtggcaataagacatgaggcttcttcatccgcaagtggtagtcgtcttgtccctaggcccacgcatttggaactgaatcatctatacatctacaaaactgatagggatcaatttgtggcactacgatcaacttataagtttcaacacaaatatattactacggaactgtacaagtccttacgcagggaaagatgatgaagcattaagatttttgtttgctattgaacttgcctcgtttaagctgcctttatgagaacatttgttaaggtcattaatctaatgtgtagaaaattgattggaataggtaaatgaaaaattgctttcaatgtaaaaaacttaagggaatattattttattctggcagtccgcagtcaatatatacaatacatttcatagtagtgtttttttataagcaacatacccgtagtagttgacaagttgatttcaaggtctcacaatttgaaattggatatgctagcttattgcacatgctgtgatgaagatccaatggttactctagcatataatggctaacactaatgaactatgactttcttcccctcttctctgttgtgctctcagatgatgtcctcagcttctgaaaccgacccattgccaaatggcaaatgcccaggttctatcatgggtaatttcgatggttgaacttgaacatacattaagagtcatttaaatgctttaaaataagggacagatatatagaagttaaatggcaattcctccccgggagagagctaaattcgacacctaaatgttcatactatgcatagcactactgttatctgagtacacttgtttccaccactttctacttctgataaatgaggctaacctttttttcatattggttaaaattccacagaccattacatttctttacttttactcgcaataatttctctctataaaagttacagattgctcagtgtcgaaggtcatatttaatttttaagtacaactgttgcactatacatcattacgtctgaatattgcaaataacctaatatgataaagatgtcaaccatatatttctcctaaatatgaaaaaactgcagttctatagtataccaacgatctaaacctctttgccttttctttttcctgttttataaacaaggagcagaaagaaataaaaatctcgaaccactaaattcctttgttaattttccatgtaacagtcaaccatctcatcttagcagttcggtgttcggtcattaaaataactattatgcattgatcaacaacgtgtgctattcttgaaacaagaagcagcgaatccaacagggtaaaaaaaaagaccttatttgttcttgattcttctccttttgttttcaatctaaaaacgtacaagggttatcaaactgctacagctactctgaagtagctttttcaatccgactttcatagtggtaggactgaactctagttcattacaacgagccataatataatgtccatacatatatgtgaaaaagtaaacaagttctctactgaagtttgagaatgagaagtaaagagcttaaaattcgtgaattaacatgtgaagatcgaggagtagagtagacaacgaagtgctgtctcatcgaacaggtaccttaatccaaccatttgcaaaagcaattgccaagattacaaaaggagttgacataccaaatatgataatgtaaggaagaggggtcttcatgggattctctccctccctttctcctgctgtctgccaatacctgcgcaaattcaatagaaaggctttgggaaacatacgtggtgaccagaaaattaagaaaatggaaaaaataaaaattatgaattgttactgttgtggttcttcctctctggttatgaatttcttctttcctccttgcttggcttgttcatctccaccacctaataggatcagatccacattcctaagtttatcatctcaacctcatttaattcacaaggatgggataatagttacatagaactgaagcaaagggaagtgagtgattgcatgtatgttacctaatttagcatgaactttgacaacggtaacattagttctgggggagtatgaacctggagaaaatgatggtgactttggcagaaatgaagttttgaaggaaaagggagaagatagagtgagcttggcagccatgttgatggttgtgtgctgcaaatgcaatgtcatcacatatgttcccttctcttggcttggatcctacccttatctacccagctaatgacctggcgtccatgcacccacttctttattctaatttaccttttcttcctatttagtattctagattgtaaattgcacaattaaatatttattttttatatttataatttataataaataaatactttagatatataaattcttttgcaaaaattattgtcattcaattcaaagatatagaatatggtaatttaaaagaaaaaaacttattaagaatatcgtgccaacaacaacaaaaaggtgattaaaaatatggactatacagctttagaagttttattataaaatagattttttaaataaattatcatcaaagttagattaaacattaaaaataaactcatatcatatttttaaacttagtttatttatttatcatcagacatagtgatttgtttttttatagattataattaactttatatagtattttttttaattctattagtttattttagtccatgttagatttatataaaattataatatcaaatgaagtatcttttcattcataaatatcaaataggttttgaattttttaaataggtaagatttattaatatgcaaaaggtgagttttgttgtttataatatattttatttttaatccttcgatttaacaattaatttaaaattcgactaaaaataaataaaatttaaataattttttttaatcaataatcaaacttaaatattgatcaaactattctatctataatgaacataaggataactatactaatttggaggggttacaaattttttatttttattgataaattttcacaattagtaagattcgaaccataacttcttttatcactataacccttgttcccctcccagttacaaaattttgagtttgcaatggcagcattttgttttttttactccacttacatgtaaacaagcatcctgtgattaaacggttaaatgatttcctagttagagttgcgaaaagcatgatactctgctacaggcgattgttacacaatgcaagtcatgcttgttcttcccagttagctttgtcagagcagttgctacattactacaactcatctcaccatcacctccaatttccacctttgaatttggactataatcgatacaaagattcttgcagcgtgaaagatgcccatcagcttcatctgcagatctacaaaactgggcttaccagtgatgttttctggtgtaatactcttatcaacatatttgtcagagttggcaatctggtttccgcacagaagctgtttgatgaaatgccccaaaagaacctcgtttcttggtcttgtttggtttctgggtatgcacaaaatggcatgcctgatgaggcatgtatgttattcagaagggtcatttcagctggtctctcaccaaaccactatgctattggtagtgctcttcgagcatgccaggagcttggtccaaataagcttaaactcgggatggagattcatggcttaatttccaaatctccgtatgcttcagacatggtgttgtctaatgtgctcatgtccatgtattcacattgctcagcttccattgatgatgcccttcgtgtttttgatgaaataaaaattaaaacttctgcatcctggaattctatcatttcagtctattgtcgtaggggagaagcaatttctgcttttaagctatttttaagcatgcaaagggaagctacagaacttaactgcaggcctaatgaatataccttctgtagcttagtaactgttgcatgctctcgggttgactgtggactgactttgcttgagcagatgctggccaggattgaaaaatctagctttgtacaagatttgtatgttggtagtgcattggtcagcgggtttgcaaggtatggtttaatagattctgctaaaatgatttttgagcagatgggtgatcgtaatgcagtgactatgaatgggttaatggttggactggcaaggcagcaccagggtgaagaagcagctaagatattcaaggaaatgaaagatttagttgaaataaatgcatcatcttatgcagttcttttaagtgcttttactgaattttcaaatttaaaggaagggaagagaaagggtcaagaggttcatgcttatctgattcgcaatgccatggttgatgtctggattttgattggaaatgctcttgtcaatatgtatgcaaaatgcaatgccattgataatgctcggtcaattttccaactcatacccagtaaagatactgtttcatggaactctataatctctggccttgaccacaatgagcgatttgaggaagcagttgcatgttaccacacaatgaggagaaatagaatggtgccatcaaaattctcagttattagtactttgagttcatgtgcaagtttgggttggatcatgttaggacaacagatacacggtgaagggatcaaatgcgggcttgatttggacgtttcagtttcaaatgctcttctaacattatatgctgaaactgattgtatgggggaatgtcagaaagttttctttctaatgccagagtacgatcaagtttcttggaattcttttattggtgcactagcaacttcagaggcgtcagttttacaggctataaaatatttcctggagatgatgcaagctggatggaaacccaacagagtaacatttataaatattttatctgcagtttcttctctttctcttcttgaactgggccgtcaaattcatgctttaatcttaaagcactctgtcgctgatgacaatgctattgagaatacacttctagctttctatggaaagtgtgagcagatggaggactgtgagattatcttttctagaatgtctgagcgaagagatgaagtcagttggaatgccatgatttctggatatatacacaatggcatcctgcataaggccatggatttggtatggcttatgatgcaaaggggccaaagattggatgatttcacgcttgctactgttcttagtgcctgtgcttcggttgcaacattagagcgtggtatggaagtccatgcatgtgccataagagcttgtttagaatctgaagttgttgttggtagtgcactagttgacatgtatgcaaaatgtggaaagatagattatgcatcaagattctttgaattgatgcctgtgaggaacatatattcttggaattcaatgatttctggttatgcacgccatggacatggaggaaaagctcttaagctttttacacaaatgaaacagcatggccaattgccagatcatgttacctttgtcggggtcctatcagcctgtagtcatgtagggttagttgatgaaggatttgagcatttcaaatcaatgggtgaagtatatgaactagctcctcgaatagagcacttctcttgtatggtagacctccttgggcgggcaggtaatgttaagaagctggaggagttcatcaaaacaatgccaatgaatcctaatgcccttatttggagaacaattttaggagcatgttgtcgagctaatagccgaaatacagagctagggcgtagggctgccaagatgcttattgagttagagccgctgaacgcagtgaactatgtgcttctttctaacatgcatgctgctggtgggaagtgggaagatgcggcagaggctaggttggcaatgaggaacgcagcagttaagaaggaagctgggtgtagttgggtcaccatgaaggatggagttcatgtgtttgtggctggagatcaaacacacccagaaaaagaaaaaatctatgataaactcaaggagataatgaacaaaatgagggacctgggatatgtgcctgaaaccaaatatgcactctatgatcttgagcttgaaaacaaagaagagcttctcagctatcatagtgagaaactagcgattgcttttgttctcactcgccaatctgagctacctattaggataattaagaaccttcgggtttgtggtgactgtcacactgctttcaaatacatatcaaatattgttaatcgacagataattttacgagattcaaatagatttcaccattttgatggtggcatatgttcttgtcaggattattggtgactgatgctaaaaattatgggaagtattgcctatgattcttctctactttggctacgaggaaatttggttgtgacattttcaagtgtaagagatattaattattaaatagtgaaaaaaaaagagaaggaataagtttggagaggaaaaatgggacatggagatagaagagaagccatatgtcccgaagcgccactaagatgtatataggattaggtgccatttttgggaactctatgtcttaacttatgaaattagtcagttatccaaactataaaacagattggacattgttgccacgctcccaagtggaagtgtcccaactatcctttttatcatttttttttcttagtgggaaaaaagtttggttaggtacattgctttaacgcattgtcttgtttttccgacctgaattcaattgtgttcatttttatacatgtctccttgctgtaactttaacgaagtcctcattaaaaggtttaacaaaaaacctttaacgaagtcctaaaagtcatatataaaaagtgtgtacatgtacgtgtctaagcggtttttttagccatgttttcaaaatcagttccagaaggtgtgaaccaaccgggttcgtggtcacacgatttgtcatcaaattgataacccgtttgatctggatcaaatcacacatcttcgaattttctttttttcaaatttaaggaaaagttcgttttattcttttttatcttttatcttataaatatttctaaaacagtttatacaaacagactaaagctgacagagactcggatatataaggtggcaatgtgttttgatcctagatcttaaattattttaagctgtcaaattatatagtaaaacatggacaaattaggacaaacaaagttctaaaatataactaaaggaacttagatccacttctatttattcataattaattatatgacatatttggagtcaccaaattattgctaagaagtattaatcgattttgctagtaagtaatattagaagaagatgtaattagtcatgttagtaaggtttcctttttcaatcacttttttatttacaagatttcaatttgagatcttgaataatatataattaatgatatattggttgaatagttttagataattctttaacaatatttatgaataagagaaaaggtaaaaagataaatacaatagattttaaattaacttatttacttaattttttcttttaaaaactctatcatctaacttatttaaaaactaagatgcataaattaattggttttcatttataaataaataaaaatgatttattttacacttattttttgtaagttcttaaagagaattttattaatattagttcatggttatattagagagagaaagacataatttattttttcatgaagaaccatcataattattaataagatatatttttaattatatttaatataaaaaaatggtgcgatgaggatagttgttggatgttactccgtgtgttggaaaggtgcatagattaaaaatagaataagttgaggttgagagtgatggagtgctcatggctatgctaagttagattgaacgatactgatgcatgttgttatcaacgaaggacaaatgtttatgtagggccacattcttaaagtttgtggaaaattagcgctttgtatccgtttattatgatgatttcgttggctttctcagaaataaagacttgactcatgtcaagtaaagaattgtttggtatggatctctttgaatataagattaaaagtgtttttgagaatttttctattaaaaaaattatatttttaataatagaaacactctcaaaaataactttttatataaagaggccgcatataaatttcttggagatccgttgtcaaattattgtgccaacttgagaaggacgtacgtttcaattcaacaaaggaagctacgtggcccccttcctgactctgccaccgtatcaatttcaaacatcctttattttatttcattcacaacctgttaaatacattatttccttgcacagaaatgctgtaaatatcctctctaatacattttcaagccaagttgcaatcaattttaactcataaaatatatatatatatatatatatatatatatatattaaaatgagtatattgtaagcattcttctttgtatctatcacacattaaaatctgccactttaaataagcataactgagaattagatctctgcggcttgaaaatttgaacccaatgcagttactaatgtcatatacgaggttttcaaatattaaagatagtttggtaaatgaagggatgagatcccatacagtttcttaacaaaactgtagctgatcctaacccgaataacatgtcagcaataatacgctgtgcactctattatttttctttctggatataatataaaaaaggtaatcaaagtaataaggattagcttgattgtgtgtttgaattgcaagagataatgaaaggttaaaagatatttgacaaattttctttagattaaaatatgtttttatttctaataaatatttgatttttatgtttgttttttaataaaattttgttttgtgtgaattcttaataaaataatatttttattttcagttcttatattatgttttcattcttaataaattaacgaatttttaataaattaacgaattttgtatttattttttaataaattaataaattttattttagtcccaactaataacaaataaaaaagatttattaaacaaacacaaaatttattaatttataatggattacaaataagtgtcattaactaaaaacaaaattattaatttattagggactaaaagtaaaataaaaatttattagaaaataaacaccaaaattaagtatttattaaaaattaaaaatatatttaagtcattttgtttataaactatccgtgttttctttttccagacccgcctttagaaagggaacttttccacaaatccaaaattattttttacattgctcaagtttccactcaggagcttatgaaagcccaaaaacaaatgtttcacagagcgaatacaaaacactttatttttataaaaagcgcattcaagatagagctgatgattttgactggggtaacgctcactaaagtgcactctttaatctgtgatacgattgagatatcatggatagggtggatacctgttaaaaaaaatagtcttgatgctcaaatcagtaacgatgatatataataaagtttatctactatagtgacattggttgaattttattataaggctgccagatggacggaattctctcacaagaagctaaacaaaacaagtcgaattgaagtatcatatttttgaactcaaatggccattttagcagcatccttctttacgagttaatggagggttaaatgaaaattagatttaactgaatcatattatatggatacaagttgaatgtgtaaacctaaaatgtttataattgaaagagatgctaaagttaattactgtagtaaacaagacgtgcatttaataaaatagagtgagcttgatgtttccattggaacagagaacagaacatggaacatagtctgacataaccatttagggcaggatttaattcctacaagcaaaaatctgggtggcaaaaaaacttggaaactaagacaccctgttagttaaaatcaatgcaaaagaaagggagatacatgatgttctaagattcacaactacttaattaacagccaccagcaatttctgattatcaaaataaaaactgttgacagctcttagctccaagttattggaagagaacgttgctttcatccttttaataaaatcttcacatttcttatttaactcttcagtgtcatgctcatcttcatcaatgatcacaagggcatttccctcttcttcttcttcttcttcttcttcttcttgggtatctgatagaacattgtcttgttctactctcaccaaaatcttttcttctttatgtggggattcagtttcctcaccagcaattggtgctgcaactgccatgtctggttccttggattctaactggctacttttctcttctatgtgaacagctacagcagcatgttcagtggttggtagtgaagaggcattgattggagcagagttgatggctattaaaacaaggaggaggccattgcagagaaggaacatgtagcttttttcaaccatgtagctgaagaattgcatgagggatggcttcaaggattgaaggagtaaaagaaatgaagagaacaaaagacagagcagagataaacaaagcagaaacttgattgatacttgtatcttcttcattctcttggaatttaacttttatgaaaagtgctctctatgtaagcaggggaatggggctctatttacgtatggacagtatggtgaaatgagatataaataggggatgtcctcctcagcgtgtgttagaagttacgcagaaaaagcttatggcaaaagcttctttacaatttacatcttattactcaattactattagcatctttctttctttttctttatgtcttcgtcaatagacttatagacatctcaagagtgttattttgttttttcaaatgatacatggaagtggaacagtattaactaagagagcaaaaaagatcttaaagagttcaatcttgtatattaataataaatactaagttatcatttttctcaattcgtgttatttattaaaaatggtaaacattatcaacgaaaaataatcttaatttttttatttataagaacagaagacaatataaaaatatttataatactcgtacatattacttaataaagtgacttaaatttgtttaataaataatttttacctatcaaacagagaaattagtctgtggttactgaacaggtgccgtaaaaaaaatcctaaaaagaaaagaaaagaaaatgatctgattcttgatttcttatttattaaaaaaatcatttttgcattataattaataacgaagacttttgagagacgaccggaagtcagtcaactaatactttaaataaaatacaaaaacgtgtccgagtatcagaccacatgagaagggcggcaattcgagcgaataattaaatatatcattgtgcaaaatttgacaaatgatcctaacccataacatatctacgtaattatttcattttttttaatttacttggaagttgaaatttcagcgctgatgagcatataaaattggttagaaaattctttgtaactactaatgtaatgtaataataattaaacttaaaggtctactttcctcgaattttcattttcagtcctctagatttaccttttcgactctctttgtaacttattgacctacgtggttcagattcttgattctctttaagttaaaagataatgatcttttagtttacaaaacgcataagttcatctactttagattttcattctctaacattcacttcatttcatttcaatattctcttatcataatatgctcttaagcttttaaattttaactgattatcataaatcaaattcaaaaaaaaaaatatatatatatatatatatataaatgcaacttaatattcctaacaatgcaactttctatctctttcaatccatcaataatttaaattatatcataacaatacacatgctaaatcggtaaaaaaaaaggttatgtattctaataacctaatgggtaaaacgttgtaaaaaaaaaaaaaaaaaatcctataatattggataaaaaggtgagttagaggataacaaagcttaccttcagatttagttacctaattccttaaacctcaccttgctcaaatcttcaaaatttcctcgagctacattcacaagttgatgcaagatatttagacaaacatacttgtgagccaattatagcaaatttaagttgaatcaaaagctacattcacaagttgatgtcccacaaaggatggaaacttctcagaatttacctcgtgtatacttctgtgtacctacaatgcgtagtagtatgaagttttttaatcctatcattatatcattttttaaacctctgttgggcaatgcaaattttcatcatttttatcacttggctcttcatttaagtttacaccagaagtcaatattaaatttaaacttgtttaaatgtagtagtaaacataacatctttaataaaaacacagaatgcattaagatatgcattacagtgtaaaatgcattcattctctccttctagagacatgaaacccacaataaaggagataccaatattctatcacatgaacctctactccgatcataacgcacaaaaaatatatttaaatccatatattagtcaaaatccatcaatctatgctagcactaaaaaacaattgcatcagcagtccgtcccttgctatttaatgaaaatccataatccaaaggaccaaaataacttgcagtcatccttcactctttccttcgcttgtgtggctgattcagctcattgtccttaatttcctccaacaccttatcactagaatcacaaggttttgaaacctctgttggatcatgcacattttcatcatttttatcacttgactcttcagaattttcttcttcagcctggcgttgtaatgattctataacggccagcatttctctattaacctgtacaaaaaaggccagaaaattgtagaacaaaacttacaaataaaatgccaatttgaatacaatgaatgaaaaattccagaatgtatttcattagtgccagtagtatttgcaacaaatattcaagccttataaaaagcatatacacgagctcaaaataaagccttaatatatttctaccattctcctttattcaagatgaaccgttttactcattgaattccatattttcaaaaaataggcataagcatttcattgtaaactaggaataattaaaagaaatccaaatatggtttggaagcatacttggagcaaatataaaacctaataatggcattcagtagtacctgtggattctggagaaagtcagcaatgtcatttgaacaagatgggcatttcataacattcttctgtgctcgtaaagtgcgtccacctccacatgccctatttctgatgaaactttggccagaaaaggtaccctccaaacaggctttgcagaagttgtgagcacaaggtgtagtaagaggagaagccataaccttgagacatatttggcagccaaactctgaacaaattggaagtcagtggcaaaattgaatagattttacaagttcaattgactgcaatgggattttaaaaaacaataaggcaaacaagatttataagtagtctatacagggtaaattatgggaacatgtacacagagcatacctttcaaaagcctttctttcacagacacatcttttgcctttcgtttaactctgattgttgttccatcttcagatttaatgtccactgatttcttgctttctggtggaggcttcttccacaaccagcaccccttttcctcctatatttcaccgaaagtactgagtgagacccatcaaagtatagattatagaacatcaatagtggaacaacatgtaccactagaacgatttccaaaactctttagtacaataattatgattgtctcactatttaatcctaccagacacaaatcaacctatcaacagcaaaaggaccagaacaacacttacatcataatcccatgatggatcaccctttctttcagttacatcaactgcccccttcaactcatcaattttaggcagtgagcgtgggcgatctccaatttcatcactgcacatcaacaaaataaagtcaataacacataagcacacaaacaaacagcagcaaagaaagaaccaaccaaccttgtccacggtgctggctcattgtcacatctcacaaacaaatacctgcaaaccttgcaaccctgtcacagaacaaagcttctccatgaatcaaaaaacttggagaaaactatcaaggaaaaatacattcccaggcctcaatcaataaacacaatgcctatcattagaagtagcttacttgtattccatttttacgccagcatttctctattctataaactccatcataacgcactccagattccggtgcataagaagaacgtttttccttgtgcgacctgaacaaaacaaaagttatttcggcacaaaataaatttgtgatactcagaaaaatgcatttagttggtaatcgaatgaaaaatattaggatcgagagagaagaggtgaccttacaacccgaacgggataacccttcctgcagcttactctcaaggcctcgttcatgttttcaaacttctggtcaaaggattgcagcttgttggtgcgtttattgccacttagatctctgccaccactgccagtgtaaaggaaccactcaccatggtcctcgtcatcctcgtacccaccagaaagggcaacagactgggaaccataactactctgtccagcaatgccggcaacatgaggcaaatgagcaccccactgccgacactccatcctgtcctcccacgtatccccgaccagaacaccacggttcctggtggggtcgttttcagcagggatgggcccaaaatggtcaggaggaacagtaacaaaaatcttaccactgcaagcgtttgcctttccagtcttcttggctcgctctgtggtgaatgcagtatcagggcggtcctgattgcgtacaaaatgatacaccttggatggacccgaagaacctcccgacttggctgccttcgccaatcggatggccatggccaactgagagtttattctcggctggctcgccatcttggtcgggatttgagcacggcaattggcgcaagtgcgctttccctgtccgatccacttctcgaaacatctcaaacaaaagttgtgcccacatggcgtctgaaagataaattgaggaaactaacacactgactactcaaaaattaatagatgataaaaaaaaaaaaaaacagagaagacaaaagaaacaaaccgtgacgggtctgtcgggtagttgcatgcatatggagcaatttaagcttccatcaaaaatgtctttggttttggttttgtcctttgaggggtcggcagagccagcgaggagttcttggcgttttttggctttctgttggtcagtgagagaggggtcggactgaatggcgtgaatggcggagacaaggtcaccggagggagcgacggggtgatgattggaggtgtcagaacagtcggggcagtcccagtgggaatcagagagggagagaggtggcgaagggagacacgaaaggtgccagggagtggcacacgttcgacaggagagggtttcggagggagtgggtttgtgtttgcagcgcatgcacacgccatcggagtcgcacggaagctgcgccattttccactgccaacaatttcgggtgcttttttgttttatagggaaaagtgagaaagtggaatatccaaatttcggattttccggagcgagggaatcacccttttgaatattttccattttctaattctttccctcccttcatttcgccatttccccctcgcgccctttcgcttctcttctttctatatccagttccagcccatactttgtaactttgtatcccatggataataataaatatacgttacctctaaaaataataatcactgattcattaaaataacaagatacgtttgaactattaaaaaagtaatcattacttttttttataataaattaatcattaactcattaataattatagtaattactgtatatgtgttcgtatttctattaagctatcctactttattatgctaaaatttatatattgaaatgatatcttttattatctataaattgatgtcatattatttttagtttaatatgttttgtaatgtatacataattttacttaaatttatttatttgttatgataacatgataaatatcataacctaggtttgaaagataaagaaagaaaggaaaatttaaatttataaaattctgtcgcaaaagccttagcgacggaattagcgacggatttagcgacggacagaatctggcgccaggagcgccaagagtgccacagatgctggattttggcgccaggagcgccacagatgctggaaattggcgccaggagcgccagagtggcgccaagggcgctagatacactggattttggcgccaggagcgccaaagtggcgccaggagcgcggcaagtcggtgctggccattataaatggaaaactcgcgatttctagagagaaacactgtttctcttcttcctcagagctccctccaccatttttgagtgcctaagcttcctagaaccttggtttctagcccaaatcacttccattagccattaaacttgtgaggaacacctagaaagctaaaatctttcatccaaaccccttgaaaccttgagctgagagattcctttctcagaggaattgtagaactcaagctaggcaaggaactacggagattcaagaacattggggctaggagaagtagttcagagtcttccttgccaattctgaggtaagaatcttgagttttctccggttaaactttgatttgggggtttttgatgaatagtgacccatctgtgatagagctagaattagctctgggtccagttgggagaggtgtttagaatgcagagaggaggaaggattaactttcagtttgtaatttggtgactgttggttttggctctaggttgtgcatgtgtgacttggattgagtcacttgatttgagacatgcaagagccatttggatgggcttgaggtgcctggaaggccttgggaacggtgtcttatgattagaccgttcaagccctatggaaattctgagttatgggtggtgtgagctgtgatgctcattgtagatggctatctgtgagtcggaagtgactctacagccatggttgatctgtgatagaccactgagggtctatggaaaggcttgaagtggatgagcctgaaaaccttaggttagataacctgggttgttagaaaggactgaggttcctttctcagaggctgtagatgtctgtttgatgagcttgtgttgaatggtctgtgatatatgtgtttgtatgccttgatagggcttgacactgtgagtgtcagagaagcaaaccatcattcgaggttttggagctgcaggcacggcttgtcaggtaagctcatcgttctgggaattagccctttctcttgtttaccacccaagtaggtgaagtatgcatgccatgcttgaatatataattatattgtgcatgctgtggaatgaatggccaaggttgcctgctttagtgattatatacatttgtgagcctgaagggctagatgaacggtacttggagtgaaactcagaccgttctagatgtatgaatatctgatgaaccctaggatagacactgagatagtgtgaggttgacagacacctgagattgcaggtgatggaatctataagatactggaatagtatcgggctagttgaggttccctagccagaggaagagtttgaggactccctggaatagttgagattccatgggaggtgccactgctctccgcctaaagacctaagggtggattgccctgtctggatgttcctccttaggcagaaatgatgagattcctgagtgagtatcctcaggtgattatgctgagattgataaagaccatggtggtggtctgtgttgagaataaatagacactgtgatagtgtctgagttctgagattctctggccagtagaatagagtcctatggtggtaggacagatggtatgtgattgaaagtcctaagagattgagtgcctcctgtgtgagatgatctctcttaggcatgtgattgatgaccctgagggatagagtgcctcctttgtgagatgatctctctcaggtgatggattgacagtctgagggatggagtgcctcctgtgtgagatgatctctctcagaccgtgatttgaagtcctgagggattgagtgcctccgttgtgagatgatctctctcaggcagtggatctggaagtcctgaaagataagtgcctccggtgtgagatgatctctttcaggcatgtgtatgtaaagtcctgagtagagagattcctcaggcattatgtgtaaagtcctgagttgagagattcctcaggcattatgtgtaaagtcctgagtacagagattcctcaggcagtgtgtatgaagtcctgagtggtggactcaggcaatgctttatatatggcattggaggcggtgcctctctggtatatacagtgtccagtgattgacactgatgattaggtacctctgtgaggtctctgtcagacgattatgagggccgatatgagatattgaagccatgattctggcttggctctgttagatggttttgagatggctgtgagagccaggatgaggtgtgatacctctgatactgagagtctttggttatgttgccctgtagtgggttatgagagctaggatgatttcctaagctcgtttctgcttggttttatgtgtatttttgaggtgaaccagggtaagggaatatctcccagaaccctgagtttactgagacgtttgtctcacccctgttgtgggttgtggttttcaggtgtttctagaggagaggagatacctcagggcaggaggccctagctgagtatgctggagtagtcatgggctgcagttgaagaccggagcagagcttcaagagttgaagctggtttagttttctgttttgtgttagggtgtaagtgtacacccattgtattgtacatgtactgttgaatgacctgatgtggtcttgtttaatgtatgtatatgtacagatgttggtgtatatatatctgcctatgttttgtatgttctgtttatctggatcagcagaagcttgtttatgatgctttaggttgtgttttatgttccatgcataatgtaatcaagaaaatgattctatagcttccgcaccgcgcgtacttagcgccgatagcgtgattctgatattgttaatgataacacgtccggggtgttacaataaattaatatattatatttttaaatatatgtttacttatacataattcatcaaattatttatggtatatatttgaatatcattttatttactatatgtatttatgaaacattgaaataataacattattatatcacttgttgattttcttcttcttattttgatctttaattatctgtgttctaaggggtgtatatatttcaattatgaagattttttatatatttcaaatttagatatgtggtgtagagaaaaataagaaaaatgaataaatatataaagtaaatataaaaaaatgtgtagagagtaaagattatccaaatatttttctaattgaaattacaaaacaaaaaaaaaaattcaaatcatgtttcctgctttttagtttgttatcatttttaaacatttatattaaaaattaacaaattatagaaatatataatgatgtttgttttttgctagcatttaataaataaataaaatttaggacaatgaattttatttatttatttacttgtttagaaggaaaaaaattaagcataacattatcttgaagtcattataaaacatgttaacttaaaagatatttaaattcattttttaacgcatgttttaaggtttacataaaaaattcattttataaacttctcttaagaggaaaaatcatcttaaaccttacaaaaatttaataaaactattttctaacattatcaaccaccgattaagtcatttattcataatttgatgttcataatccaaatataaaattcagcagaaaaaaatatccaaatacaaatccaaaaatcaattttaatacaaatttatacgactaatactgtaaatatgacatgatcaaaaacaaaaagatatatatatatatatatatatatatatatatatatatatataaaatcccttaactacacacaaaaatgtgaaaaataaaatcatagtaataaaaaacaaaagaaaattaataaaagacaaaattaattaaaaatataaataaagttaacagataagacaaataaaaagtctataaatataaaatattttcttactttatctatgcaatttcttctggattctttctttagatcaaacactctcatcatgtgtttagattgataggaaattaacaagaagaataatagccctctatcacgttattcaacctctgaagtctgaacaatagtacattattacatttagatgcaaaagaataaaatgaatccccctccccccaaaaagaaaaacgttaccaggtttatatttgacttgacgatcatgtacagtggatggacatttcaacaatagcaaggaaatttggcaatatatatatataaagctaaattatatatagaagtaattagatgtatcggttgcatttgccgtgtctttacaaagaatagatcgagcttcaatcactgagcgaggaggctcaatatccttttcttgcaacgcatttcctcgtaatcgttgcatttgggaagcaaatgtatcatccaatatctgcaaagtgaaacaatcaacgtcaacggtgcaatattgcaatcaacaataacatcatcagaaaataatctaataatattgacttacccccagagcatatgaagagccgttgtaccatatcctgttttcttttctcccttcgagaaatttcaaaataatctatcacaaaaccaatgaaaataaatgagatccgagaaagaaaaaaatatgaaccaataatataggagtttttaaaatagttggttacctgtcccatcctatcccataatccacgacatattgctataaaaatctggctggtaaagacctcatgcagattggagatgaagtcagtgagttgtgaattcagcaactgcattctttcacgcacttctgcttctccatctgtttctgttgtttcctcaaggatctttttcagccttgtgttccgattagcttttgtctgaacaattcaattgtatcaaatgtaaataaatatttgaggcttctaaacaaaaactttatgctcactattgttatccattttacgataacatagaactaacgtagaaaactggagtttgaatgatcttacattgttgacaagattccctattattgcttgcaaataagttttgtatttggttctcaagagaacagtgattccattcatttgctccccaaacagtgtcttcttatctcccatgacaggtagacaggatgcccatgaatttaggatgtcttccactctacaatgaaggacatcaagaatcctcttgagggtgttcaagaatattcccaactgtggataaaacaaaatgttataagaaaccaaaatcctgcatgttttctattatgccacaaaagtttgagtgagcttaaaatttgagtacttaaattaagctggattttagaatatggacctaatgcaaaagcatacagagaacttacttgattaggaaccaaatgaacagtagctgattgtcttcttgctatcttttgaacttgcaagtgaagtctcttttgtatgctatctttcaaaggagttaatatatcgctgtattgtttttcgagggatttcacaattgccctttcaatgtttgcaacagccttacagaaagaaaagggtaagaaaaatgcaaagtcaaggtatttaccacatgttttatacagtggagatagaattgtttatatatatgagaggagggagacactatagaaaaagatatctggaatgctgatggtttaacagaaatatctctaatttagaacttacattttccaaataaagtgagtattgaggccatctgttgattacaacttcatactgggtaaggttgtctttgattttctcgtacatttcctcagcaaatggggaggtggagtggtttgtggttactccagcccatggcacctgtgtcattattggggaggtcaagtcatttatagactgaagtgctttgttgtatatataaaaaaaaataactactaccttttctgctttacataaatcaagcaaactaagttgcatatcctgtatccacaccatgatataattgtggaacaaatttctggagtctacgcctccctgcacaagactggaacatgaagagtattgcgagtaagaaatgatattttactgttggggaatctcatgtcttttttatactgcattttgcattagcatgggagaagtttctttcacaaaccttatattccatgattccaaatcccgttcaaaatctgcagctgcaactagaagctcatttacatgtgcctgtggactcgatggtggcaatgcagaaaggaaagctctcagtctcttgcacagctctgtgctgtaaactgctgctgtgatgtttgtcaggtcaattgaactgaaaattggaaaatagaactcagaaaatctatgatgaaccaaaattaaaatttacagagaaaaataacgagaatttgagtaatgctatcattggatgaatgggtaccgacgttgataataagaaactctgactgaaacaggagaaaataacattctgttatgccaattgaaagttgcagaatgtttaaatttaataaagaccaattgcatctcccatgtaggggatgtaaaaaagataaatatcaacccctcattataattatgtgtgagaattgaattgcaaattgtatgcactgttaactgtattgtcaacttgctaaagagagctgttatagccaactaccttggaaatatatgctgaccatggatcgtatgctggttatggatctttatgtctgcttgaatttcatttcttattgaaacacaaagattcttcatcttcaggtatgccgttgagatggtaatggtatccattaggtaacattcagaggtgctcgacacaaattcatcagtctccatcatgtgttttctacacctttttcttgctgcagtctgttgacagtagccttatcatttagactccaaaaaaggaaaaccaagctttacatgcagccataaatatacttcaaacatccatggttgaaactatgttgaacaagagcattagttatcagtaactctgcaaatttggaattacctgaagatagtttcttagaatagtttgagcatctagagatagaatatcatgaacacttgtgtagacttgaacagcaggatctaaagctggtgcagcagcatcaaatgctggaccaaaatgatctgttaaacctgttggcgagttttcatctagcgatttgtaattctcaaaaactgtcgctagaagactttcaatttgagtttcacagtctgaaagtatacttctctgtgagaacaagcaaacagagaaaactgttacaccaccatccatttctagatatgtatgacaagtattaaggtggtctgaactctaaactaatgccattgacatagcatattaaaattatgagaagctgaaacaacataagattaagcaaaccaaattacaagatatggtaaattactgcaacgggaaagagagcaatatatgacttacctcctgcctggtcagactcctctcacttctggcctttatgaggggttctagcaactctctcacaagctctaggcagtccttggttggagttgccacattcatcacatgtaatagatatctacaagaaaaccaccacaggtaagtgaagaaaaatgaagaaattaaaagaaaatcatgtagcataaagaatatcagaaaactgtttcttattttcatatttttgggggcacacattcaaatacctcagcttggcatatgaattagaaactccatagtagtccgcaaatgcatctaacaaccatttccaaggcccatttaaccgcaagtttcgggagtggaaatgttgtgcacgcatggcaccctccaataataaatcataagcttgagtttccacaacagccgcactctgcagaaatgtacaaaccgagcaaatgaaaacctgaatctatgctcagaacagcatagccagaaatgttgatattggtgtttaatggccaaaagtttaaactaagataaaaacaatattaaatcatgatgagccttttcaataaataaataaaagatcctttgtccgatcaaattagaatagttttctttttaataccaacaaatgattaaacaaggtgataagtatgatcctctccatggttaatctcagaaagaatctagttcttgagaacaatttttcgatatattacatctaagatgtatcctaaacagttacttctttgccttagtcctgagatgtcaacttggaagatgatcttacatcaactaacttgaatatttctattagataaaacaagatttattgaactaaattttgctagagacagaacctttatgtgattgttctcatcgcttgtcattgtactgccaatagagagctggatcttgccaacacattcacgttcatcatgatatactggccaccaccgaattctgtcactctgcacattcaagataattcattatgtgaatgtggaaggtgcaagagagagaataatatccatggacgatgaaagggtagagctcatacaggattatcactgagggatgaaattggaatcctggcttcaccatggactaccttttttgaatcttggacttctacaattaaagcgtccccttggctcaatgggaaactgaaagtaggtgagagttcagaatctttatgattattatgcaaatttcaacaattgaagaaatcaagacaacatgtgattgtagttgtcttaaagaatgtacaatgtaaatcgccatcttatgcactaggctgtgtactggaagaaacttagaacataaagcagtgtatgatatcaactgttaagattggtttttcatcaattgtctactactatacatatcctgctaaaatgcatttggaaaaccttcaccgactatcatgtttagctattttctaagaagagccaaacagcaggtcaattaaaaacacttttcccaattaaaatataaaagtaaaaaaaaatgaaacttacaaatcatggtaatctccacttccagggcgcaaaagaattgcagaacatggctctgattcattttcttccgtcgtactcttaagttggatcgaacaatgtagtggctctacaagaataaaacagatacctttaattcattcattaaaaggattggtgtttatgaaaggaaaaaaatctatattaaaaaagcccatttcatttggtggaggataaagtatgactcctaaatcctgataatatgtaactcttacagtctaatacaagtctcattatcaagatcaaaaagatttctaaactataaaacgaaagagttgctgaaaccttcagatcccaaggagaaggaggccgtcttcatagaatttatgccatttttcacaagtgatgaaacatgccggacgtactccaccccagtttgcatgtagattgatcctcgctgtgactttgtgatcttaagtttttgtcttggtataatgcgaagtttcttcactgcaattttcatataggatgtcagattatacagctctcaagttgtttgaaggagatccaacgttatgaacatagttacattaggaagttctaaaatatgtccataagaaaatgtcattccatacatccatgtacaattataatcatattacatttaaatgataaaaatgtgttgagattgtaagattaccttccactcttattttccctacaactttcttaatcttcaggggaactgtttgttccgaattcctggtatttctgccttcagttggcttgacacctcgaggttgcaacaagaactcatgcaatctatggaaatagagaaataagagaaatgaggagaacaataaatgaagccaaaagaaatgtgttggtaaaacaaaatggaacccaccctaaagcacttcggagagctaggcactcatcttttaaaaactctggggcctcagtgcagccttttgcccatgcttgtaggcataaacgtatgcaggcatcataagtgataagggtttgccaggcatattgactattgcaactgctgaaataacataacatgccataaaaggaagtgagcatataaatgtgaatttcaagataactatattaattaaattttgctataattagcaaagtattaatgttggtcatgggttcgaatccggaaacaacttctttgcatatgcaagagtaaagttgtgtacaatattcatcccccttacctgcgcatagcgtggagcctccaggtaacagggtacttagttttttagcaaagtattaatggattcaaactaaactaaatatttcgttaaggttgacagctaatttgataattgttaaatagaaagtaaaagttgaagatagacagcacctggtgttgtaatattgtaaatgaggggtctgtctttctctgtcatctgtaaaattcttgtccagtctacagagttgaatttaatattataaggaaggacactagagctggttaggaattggaagaagaactgcaaacagacaaactaaaaaagagcaaatacagcacctttgagcgagctcagcgacagtgggtttagcaacagtgttgggcttgggtttttgttcaatggaagtctcactttttgtgccatcataatccagagattctcttgaaggccatgatccaggagggtaagttggttcgttccttagggagcattctgaatccctctccagtggagaatcagaatcaatgatgggaggggcacttggagtacccaaaccaacggtgtcatcatcagggcaattcacattgcgaaggtgaacttgcttttgaagctgaacagtggcagcgccagctggagtgaggttcctttgaagacttatattgaaacccatttctccatctgtgaaccttctaactgtgttgggaacctgaatggttaggttttgattggccaaacctgtcttgagaattcctctgcggcctttgcatccaaacaattgttcctcgtcatagtagtgtggtattggagagtccgagaaatcaaggttgttgggagcagagacttcgtcatcggagaaattggcatcctccgtgctttcgtaactgtcatcgtgatcggcaaaggcgaggttgggcggttgtaataaagccgagtggaacttcaagggagggagaacgggagaattaagagagttggcactgctcaagagaggagatcgtgggaatcgatcgctgctgcagctgattttctcggccagaggagagcgtggctgaggaagaggaggctcttcgacatcaacatcaagtggtacttttgatccctgtattgtattgtatgtataaattggtcagtgaaggaatggaatccctaataaagaatcaaacaaaagaaagaaagatggaaaaagaaacaaagagttagcattagattagacaaaaagaagaaaggtgacctgcttgatccattggattgcgctctcgtcgagtccttcggtgaacatcttcgccagagtcagagagaggagggagaatttagatcactgaattaagcaaaagcaaaagcaaaggaaagagaggagcctaaagcactgaatcacagtgtacaactaatacatgatgaagtaccattgccaacggctagttttcttttttcaaaccttcttgcatgcgtcacaaataattctttcttcctctttttattatatcacacactaatataataccatatacatctgggatgtgattttcagagtaattataatttccacatcccatttataattccttacctttcacggatttctatacatttatgtttactaattttaagttttcattactgttaactgcgtgtaatgtaataacaaagtaaacatcatttttttttttacgggaacatgaaacctgtcattactaatactattccatgtctttttcttttcttttctttttattttctattaataatacattgttttagctacacaaataaaaaatgtatactttcaggaatttatcacaacacgtggggggaaaaggtttatgtcttcttattaaaataatgaaatatgcgtgttatacaaataattaagtcggtcaaagattataaaaatattaaagttttttttatatagtagtattactacaatactactaagagacgatagcttgcgctctatatatctcttaatttatacggttatattcaacacatcatattgataaaataaaagaagaagttattcttatctttaaatgatttaagaataatgtgtcttaaatcattcaaaaatatgagttctagctaaaacgtttaaatatatatttttatgtttataaaattttattaacaaccaatttaaataatttatcaaatcaaattgtaattaaaacattatatttacaaaccaacaaactattttggtacatacataaataccagtgcaacccatgcaccaggtaaatttactacttcattcctaaaaaaaaagaaaaaaccttttatatattagatgccgtgtatgaaaaaaattgaaatatgtttttatgcagagagtagtaaaatataaatttatttgccagttatgattgaaactaaaattaatatcagacagtgaccaaatttataatttaatctggttgtttgtacttagacagtatttgagaagatgcaaaaaatgagtgggtgaatggtagatagaagcacctaatcacctaccccgacacatgtcagcaaccctctagctctacttaaagcttcaaggcctctgaaaactctacaacttttgaactctcctctcgtagtggtatggcgagcattattccagaaagtgacccccttaactggagtcaggcagcagattcactgaagtgtagccactttgatgaagtgaaacgcatggtggcagagtaccggaacccacttgtctgtctgggtgggggagagacactaactatatcacaggtggcttctgttgctgttgccgatcccaaccattacttgcaggctaaggtttccctctcagagtcttcaaggccaggcgttgacgccagctgccactggatcatccaaaacattaacaaaggcactcccatttatggtgttaccaccggctttggtgctgcctcccacagaagaactgaccaaggccttgcccttcagaaggaaatggttaggtctgcttcttctctgcttccttctcaatatcttggaattatcatgcaacttcattgtcaatactaatcaaaattcatttcaaatatatctttcaaagtatcaattataaaagtcaacttacttttatatatgtgacaacaacctatatattatatgacagtatatagaccattccattccaatttaattcttcttttggtttatgtatttacggattttccatttttccttcccaaggtttttaaactgcgcaatatttggctaccaaacagagttatctcacacactgcctaaatcagcaaccagagcagcaatgcttgtgagggttaatacccttcttcaaggctactcaggaattagatttgaaatcttagaagctatcaccaaactactcaaccacaatgtcacccctatcttgccattacgtggtacaattactgcgtctggtgatctaattcctctgtcctacattgttgcattgctaactggtaggcgaaacagtaaagctgttggaccctctggagagtcccttaatgctaaggaagctttccatttagcaggtctagattctgggttctttgagttgaagcccaaggaaggtcttgccctcgtaaatggcacggccgttgggtctggcgtggcttctaccgtgctttttgaggcaaacatattagctttactgtcggaagttctgtcagcagtttttgctgaagtcatgcaggggaagccagaatttacacatcatcttatacataagctgaagtaccatcccggccaaattgaagctgcagctattatggaacacattctagatggaagctcttatgtcaaaaatgttacactgcaacaaccagatccgttgcagaagcctagaaaagatcgttatgctcttgtaacttctcctcagtggcttggtccacagattgaaatcatccggtattcgaccaaatcaattgaaagggaaataaactcagcaaatgacaatcccttgattgatgtcacaaggaataaggctctgaatggtggtaatttccaaggaaccccaattggagtttcaatggataatacacgtttagccgttgcttcaatcggcaaactcatctttgcccaatttactgagcttgtcaatgatttgtataacaatgggttgccatcaagtctttctgctggtagaaacccaagtcttgattacggtttcaaggcatctgaagttgccatggctgcttattgttctgagcttcaatatctagcaaatccagtaacgagccatgggcaaagtgctgagcagcacgaccaagatgtgaactctttgggcttaatttctgctttgaaaactgtcgaagccgttgagatattaaagctcatgtcttccacttatctggttgcactctgccaagctattgacttgaggcatttagaggaaattttcaagaacacggtcaagaatactgtaagcatagttgcacagaaaacattagttacagaagacacagaagaaattaacccatttcgactttgtgagaaagatttgcttaaagtggtcgatagagaatatgtattttcctacattgatgatccctccaatgttacgtacccattgatgccaaaactaaagcaagtactttatgagcaagcacacattagtgccattaatgacaagaatgtgagcttgttgatttttgagaagattggagcttttgaggatgaattgaagtctctcttgccaaaggaagttgaaagtgcaagggtggcttatgagaatggcaatccagcaattccaaacagaataaaggagtgtaggtcatatccactgtacaagtttgtgagggaagagttagagatagggttgctcaccggagaaaagactctctcaccagatgaggaatttgaaaaagtatatacagccatgtgtcaagcaaagattattgatcccattctggaatgtcttggagattggaacggggttcccatcccaatataatgttgtaatgttctactgttagacaataacttgctggcaacttttttttttttttttttctcgtgatgtttgttttaggattttatttgaataactagttgagaaaaactagagtgaatttattgtgtatgccttatcttgtcaaaaaacaaatttctgtaatgtgtcaaatataaaataattttgcatatagtaccaatcaatttagtctaaatagcttgtgcagacaagatccacgcaaaagtttctcttgtaacttgccaaactggataaacaataaactgaagagcatggctaagggaatactagccagaagaagcaatccttataacaaaggtttgttataattctttcacttctagcgtagccgggagtttgttatcagaaccatacaaaacctacgaggaaggtatacaaaacacctgtaatttataaatgtttttttcttcgtttttcttttttttaggatacatgaaaaccaaccaacaaactcaactcctaacaaaggtgatactagctagtatcagcagcaggagaggatagcttccttttgtgatgagattgacagtatcaagagagttagatagacagacaaatgaaccagttgtcctctccacactaactatttactgaaaacaaatttagcatgtgtttggtttcacatcgtagggacatcatgcgggtttatcttgatgccacaacttgtagcttccacgtccattgttaatcagacgtgaaaagaaacatgcgcatatctctctcagacttaagataaagacacaaacatcacaacaagactcaccttatttgtacacgatcccttaaacttgttttggctttaccagaatacgaaaaggaacatcacaggatccaattccatgaaccagcgactaatagactggtctatttttgcaggtcgttttcagtacatttatttaattttttccacatccacgacaaatatgtatgttctcagtatgaagtagtatgaaataataataatctgtatattgaaaataattccatttggtatacatatttttaatttctaatttatctttcaatatataactacatttttcgtacttcataacaacactcccaggaccttttacccctttttgtacacatttcgtttccaaatttacccttcaaaaataattgttgcgtctcacagaaaaggtgttggttactggcttactgcaacttctcccacacaatttgatattttacatttttcaaaatataattgcaaactctaattctcccttcaactactatgttcacacgtccactgcattattttatcctttttctcattcccgtaaatctccccttcaaactttccttacctttcttctccacttgttttagaaatttttttctcctcatttctattgacactcactcacggcagttatcgccgatttatttattcaaaaataatttctacttcatgaacgtgcataacataacttcaaagtgactctttcacattcacaattatctctctcccatttacaattatccctttcctcctctgcatctctttttcaggaatgaaacctttcatttttcatttccattcactaaaataaacagtgcttttaaaaataggtcatgtacgcataaatcactttggtttatttgcatttgtcttttttttgtgtgctttttcatgtttttactttctattgccgtgctcattttagttttattttggatgctatttcggaggaggcttcactgattaatttattgactcaattgatttatgtttaaaataattttcaaatgatgacaaggacttttttaatacaactgagattttttaaattaaatttaaaagtttatcattttctttattagcaaaaaatgtaataataaaataaaaatacagacacaaaagtataaggatgacaattcacctttttctttctcctccttttcaaggttaatcaatcggagaagaaataatgcattctagttttcctttcaactcttaattgtgtattatcaaatagcttttgttgatataccagaacaataataattgtatctttttttacaccttctcataatagagttgcctctatagaaataatctaagttatattttattatattgtatgacaaaataaatttaaataaaaaaatatgataacataatagaaatatagacacacgcctgtatttttgctaataataataataatatattaccaagccgtatgtggataactaagaaaaatcatgttaacgaatacgtcactttcctatccttgaacacaaaacattcgaacacccaaaagcacagtggatggataccttgaagaaacctagaagtatccatttaatttttcttgatatttgaataaggaatgagacagtctgtgcaaattacaacttcctcaaacaacttgacaaaactaaatcacatgaaacagaatgataccaaacactagttgaatgagtaaacaacttacgggagagacagatagagagtggaacaaactgtagttcgcatagcaacataaaattgagtggcaactaattactgcaatcagcaaggcatctatttccccactcaacatgctgcaaagcaatcaagctacaaaaagaattaagcaaaagttatactatttaagaaaatttcctcttccagcatgccttttgcttagttggtgagagatagcaaagcaaacttcaatctatctttactgatgagaacaagtagtgcacaaagtaaaatgacatcaggaagccaatggtgccagttgacaacatgattgcaattgccatgagcagggaatagccgagataaagtatagctgagacaggtccactcaaactctgcaggtcgaacaccaagtagttaatggagtacaagaagacataaagagcaacagagcctgaagcaaagaatgacttccaccaccaccgccaatcttccacacaaagatgcatatatgtgaggaccactgacacttcagcacaaacaataaccagcaatagaagaacaaccaacaggaaaccaaatacataatagaacctcccaagccagatactggaaaggataaagaaaagctcaatgaaaagggttccaaatggaagagttcctgcaccaagaataagaagccatgatggatatttacgtgcaggaatctcccttggaatctggttagttcgcacaggatattcaatttgctgagcttttgtccccataaatcctccaatgagggtaagtggaactgatatgcagaaccagaggaagagcaactcaaaatacagggaaatgggaatagcaccagtacttttgctgccccagagaagaaaattcagtcctgttagaataataaaagcaattccaggaaaaaagcatgcagataaccaggaaatggatctccacccttccgaggttcccttaatggtcctccatagacgtacactgacatatccagcagcaattcccaggaaaagatataaaattatcatcccagtaagcagcatacccctggaagctggtgacatgaaacccagggctgcaaaaacaatagtcacagcagccattccaagaatctgaaccccatccccaaccatcacacagagaagcttcgaaccatcaggctctctaaatacatcacccacaacaagcttccatccagaaagctcctcattcatctgcgcttgtgcctctttgtccaactcctcataccttgtcaagtcccttctcacagttctcaagaaaataacaaagacaataccggctaggaaaaagatcaccatcaatgaatttaggatggagaaccaatgcacccgggagccctccatctttaagtaagcatcccaacgcgatggccatcttatatcacttttcacgaactcaacttcatatgtaaatgatatcctctcttgctctttaatcggttggtacttgtctagctcagatgggcagtttgtcgaagagatattgtcatacatgtggagttttgtcatgacttcaggatcgcgcttaacactgcaaggggtaacctgaaagccaacaatttcatatccagataccttcttcttgtcagcttcagagataacacccataccttcctccccagtcccaatgatttcaacaccatttccttcatattcatgaaccaagactgtgaatttgagatggttaatgatgtaatctgcactaccatcaggtggtgtgtagccaacagggaaccccgtccactggatcttaatcccattttgattggcaaacctcataacaggcaaattgtcaaggatcatatttacttgatacagatcacgagttctttgtttcagtagctttacctcattctcattcaaggcggtcgtagtacagaggtagattgactgattaacattcatgcggaaaaggtagggagagttatcaatctgatctcccctgaggagctctccaagattctcagcacttttctttactttaccaaggggcttgcagtaagggagactgtagtagctgtagggaagctcggtctcaatagaagtcaatgaattaaccttggcatatatctgatctccatttgagtaagtatgcatgtagcttcccggaagataaaatgcattgctaatttgtacaaacgcattgacaatgacgaaaaggcaaacccagtagatcactggttttctcctacttggcacctccattttacaccaaatgtcaaaaaattaacctaactctgacgatgcattcaacacgaaatctacaatggaataaacatttcaacatgagaggccagatattttcaaagaaaaaaaaaaaacagccaaatgcaagcacaaaataataaacaataacaatcatatcaacatattgaaatcagatccaatagttttgaagcagaaaaaaaaaaaaggcgatgcaggtccgctttaaaaccgagaatcagatcacaagagtaaagtatagcagcaaacaagtccattgataaagctaacaagtaacaaaacgagaagcaaaaacacgaggaatgtaaaattaatcgatgcaggagaaaaagcagcaacaagaagcaaaagcaggcatcatgagcaacatattgcaaagggaaaaggaagagaactggttagagaggaaaggaaccatgaattttggcgagacagatctcaaagctcaacacaacgtagcagatgcagatgtagatgcagatggagatagtaaggaaataaaataacaacgcaagagaaaaagattcgcactcgttcgccaaaatgaaaatgatacttgtttgctgtacggtatggcccactcaagcccaccttcgcctcaatactctgtttttagttatctgttggaccctctagtgaatcgcccggcctgctttacatttttttgttcttaggaaactctgggcttttgcttcctacacctcacataatcatattccaccataattttgtttcccggcaatcacattccggggaatattatgcctaagaatgttatttccatatacatatttagttggcatttagtaattgtagaacaatttaaaatgtaaaaaagtaaaagtaaaaagagaatatcaggatgtaatgagaatagatagttatattcccatgagaatatcatatacccttccctcctctcttgggaatagaatttgcttgaaacacgaagatataacattcccctgggaatacaatatacatggttataaattctcataaccttctaacaaacattggtatccctgagaatagaggaataacatgacgtaaaataaatgcccccttaagataatttttaactgattgatatagtaaaaaaaaattacattaaaccttaataaaattataccaaatatcaactttcatttaattctttttgaaatcacaccaattggttggtccttgttcttccagcagtttttgtctttttatgcatataatctcgcccgaaaaattctgaccacgcaaaatacacatcaaaatgagattaagaattttttcgaagttatagaagaaaataatacatttttatatcgtgatttggttcgagtgacaagaaaacttaatttctcttaaagttacatgtttaaattttatgcatggaataaaataaaataaaactctacaagagcgtttagtctttttttctccctcgcggagtcgtggtaaatgagttttgtctactaaaaaaaattctttttattcagactcaaaatagtaaagaattaaaacgattttcaaatgcctaattgtggagcaaaattaaaaaaatcttgtgacttgattgctgtttaaatttcaggttgccgtcaaacaaatgttgggagttaagctattgccttaaaagctgcacatttgagtataggattcattccagtttaactacattctggcgagatccaatcttaactagattaattatttaaagatgatttttttaaaaattctctcacaacatatacagtttatagaattgtaacattattcagactagtgcaatttggaatgcagaaggctgaaataaataaaagcttgggtacggttaatctaacgagcaaaaggataaaagaaagatgtggaatgtttctagttgttttacatgtcaattcttacagcggcacaccaaggaacaaaaaatgtccacatgatggttgagttttggtaactgcgaagcgaacaagatataatagatttagtggaacttgagactggtcaagacgttgttgtgcacggggtcagccaaatgatctaggaggttttggtatgggccaacacctgtgacaagagcttgaacaaagtaacccaagattgccaacatagccaaccttccattcttcacttccttgagcttcaaatccttcaaggacttttcatccttaccaaagccaagagggttgaagaaaggtcctcctgggtaagctggctcaccagaacctccaagacccttctctagtcctaggaagtattgtttgcccatagagcctggtttggcccagtcttggaatcttctgtgctctgcaaatcccatcagtgccatctcaaacacgaacagtgtgtaggagtctgcccagtagttgtaggttcctgcaggtgggaccacaccggttctgaaccatgggagtgctgtctcctgagggatcagaccagccttgcctagaatttcaggtgctatggaaccaactgcacccaacattgcaaaacgaccattgatgatctcaccatatgctagccattttggctcaatgaaccctcctgttccttcagggtccgaaagtcccagagggtcaaatccatagtcacctggaaggctgcaatgcacatgatgccagataaagtcaatttcagcaccaacatagtaattaattatttaccactcttctaaattgcaatagatacacacaagtgttattcgaataagctttccaggaacggaataaaatgaattaagtttctttcataagttttttggagaaattaagcgaaagagctactataaattaacttaattatgttttaactcatgaaataaacttcacttcacctttttattctttaagtgcttatgagaagtttatatatccagacatgatgatatcgttatattatgttagtgatgaactaggatgaaatttacctgccatccaagtaagaaagactttgctttgatgcaaaccacaaaggtcggtctgatccttgctgaacaccaaaagaaagagagtttttttatatattaagtacaagtgtagatagatgaaaacataaaaacaaatggagtgagagaggaattacagaccttgacagggggagtagcagcagccttaacaagaaaggaggcttttctggagaaggcaaatggagattggagtgatcttggtccaagagtttgtcttgcagcctccgcagagaaggtaagagatgatgatgatacaagagcttgtgcagccatgctcttaatttacaagcagaggattagctaggaatgaatgatatctattgctcccactaatagtacgaccagtatccaactcctggtggatattgaatggtgaggatgagattatgatctacttctccaaccagctttatacacgtaatatcatgaatcatcatctaatctcaccccgcctcctgtggataatatcttcctttctctacttttctttactctcaactctataccacgtgttctttttttaacataaatctttcttccatcaaatcatttcaccattgcccacaatttagaaaataaataaaacacctaggatccgtgtgtaacgttcaaatgtcaaaataattattaatgtttcttctctgccattgaaaattattttaagatattgtgttcatataataataataaattatataataagttatacgacacttttttttctttttctttctctttgcatctcatcattcattttatcttacatttctattatcttcactcttatttatatgaaattatgaattggtgcctatgtttgttgtgttagagatgtttaaaattcaatctaatcactttaaactagtaaatcgatctaaaaaaactaaaaataatcaaacaaagaaaccacatttttgttgcaattaggttttattttttatacctattgtaaatcacgcattatactttaattatttttttatgcctccaaataaattttcattattctaacctaagtcatggcccaattttgatgataaaatatgtaacttcatgtgttgagtatttttttagttatgtatttttgtgactaaaaacaatggtaaaaaaaagagacactccatgaataattaactatgaatggtttttaatgcatttttttgaagaataggtttgtaatgtaattataataacctgtgattttttttttgcttcatttactataattatgtaaatgtcatttttaagggttgatcatgactcaattattacactctacattggaataatttattttgtcaattatcaaattaaaataattttggaagtcttgtgaaaataaattttaaaaataaaaaaaatattggattgatttgattcaaatttgttattagttacattcacatgaaatcagattgaatcccaagaattttatgtttagtttggataatttttcatttaaaaatcaaacatagatgtatcgcagacacccctgataaatataatttcttaataattttattattttaacgtcaaatagagggacacgaaacaaatagaagtaaaccaataaatactaaaaaaatgagataagtatgcttggtttacaaaaagaagacaaaaggttcagttaagtagaaagctaaacattatgtcgtgtttggtttgctaatatttctaacttcgaagataagttgctcacaaagtttcatatttagacgaaggttacgctgcgttagttaaaatacttgcataccgttcgcaaattctttttgatcgttagattcttttatttttaatggatggttaaacaaagatttctttttcttctatttcccttgattgcttcctagtttatccttttctttttctctttccttcgctcttctaccgtcaaggaccacagaggcggtggtgcctcatcggagaatgaatggtgaggttatcaatggcgtcttctcggcttctgctatcaacgagtaaacgctgcaggccggcggcaaggttcccttcgcgattagagtgcggcggcgaccacaaagtccttcacaggtctcctaggatgtgattcttcaaatatgatgatgccaatgcttggtactgattcttcatattagatctgatccttcgcacaactgatgttcaaagcgaacaggaaaggaagtaggagatcatgggggcgaagtgcgttattgctcgtagtggcaacgccatgaggtgtggcgtagagaacaacctctcgttaccagcgaaaagcgatagcagaagaagagggatggaatcgggggtaaagaaggaaagacaaacaaaaaaagaaagaagaaaatttaaccattgattttaatcccactatatctaacggctaagaaatccttttccactatgtgtaagaagtttagcttatgttgtgtagcctttgtcttttatccaacccaaattgggtcatccattataatttttaaccatacacttaaaaaaaataccttttcccacaaccaaaaacccacggtgaaaggtgataatcctgagcaaagagagcaaatgcctcagcagaagatacaatgatgattaatgatgattgcagttgcaaagcgtagaaaggaccctctcaagccatatccagatcttggagagaaattttaagttgaagatctattcttctaagatccaatagaaataccctcaagattttcatattaaagatttgttgattgtaaaaaaatcctgaaaatctgcatatttaaaaaaaaaaacattttttattgtttctctcattaactgattctacgaagaaacacatctagaaaaagaagaaaaacagatcaacaaaaacataacacagtccaaaacaataacacaacaaatacataataatataattttaaaacaaatgataaaaaataaaataattacaaaatccaataaccatgcgaagagacacggagacacgacagtcgacgtgcgatggccagtgacgaccatggggcccaattgaaggctcgcgtggccatgagaccctctcatatcttatattataattataattattatttttgataacgagccatttgctgggcccaaatcatgcaagtgttattcaggacgcacaagctagatgtagttttaaaatacaggatgcagcttaaagtaaattgggtttacaatatatttatgtgatttttttaatttactctgtgcgcctccattttagataatcgtttatagagattcttgtaccgaattcgtcgtttaatagtattttgatggaaatgataagactggggggagatgagagcaagcgggtaaaatagcataatagtaccttagcaagagatctccaagtgctgctttttttttagctaactttatggtaaaatctagcattgaacataaaaaaactttagtgtaatacatccatggcaaaacccataaaacaatgcaacaatctctgatcacttcccctcaaaataactggctgaaatgttatttcttcgttgtgcttgccgtatacctcgtgagaacatagcagtctggcggtgtaatgtttgtataatagttctggattgtttctgtaatttcaaacccaaatttcttatagaagtttatggcatcttcattgtttgtctgcacatgcaagtaaacctcagaaatgttttgcttggagcaaagatcaagaacatgattcaatagctttgttcctgcatgaaccaaaagattcacatcacaacacttgcatagtttataaaaataacgagcttaaaaggaagtgataaattttgaaacagtgattgttgccagatgtaaattaacatgttcccaatatgaagcatgcaccttatgacaaaccattaatatgtatttgtggtactgagacaggtatccacaccaaggtcattaaaaaaatgatcaattaaactttcaatcaccagggaaagatattcagtttctttcttaccaataccaagtccacggtaaggtgctaaaacacctaacgtcatgatgtaaacccgaacttgccccccaccttccttcttctctagccggcatgcaattgctccaacacaaatatcactatagtaagctgaaagacaaaggcaaagtactcaatggtgttagacacattctataggccccttgtctacccatcccttctttctgtatcatccatatatcaagcaaactgaaagcacagagatatcaaacaagctggttcgactaaagaaatattatatgcttgcatgctaactctaagtccaaatgctttcaaaagcacatgattaagtattgaagacatcttgtgttgtattccaataaagataactctgtacatttttctaggcatggataaatttatcaaaatcaaacagggagtgcatattctccttaaataaagcagaaaaagaaggggggaaatcacttcatgagctctccaaaccatcagcatatccaatgttgtcaaaatcaagatcttagctaagaccgggaagggagtagaagattatataacccaggattgtaacatgaatcataagatcctactaaaaatgcaaaattatacttacacatgcgtacacaaaaaataacatagatagcaaaaataacacctaaatcacaatatttagataaactaaaattgaaaattcacaatcataaggttacgtacaaatcataaaaagtcacataacataagtaatcctcaatagcaatcttaaacataaagcacgggcagaaaaatagaagcttgaaggcagtgaggcacaaagcttgaaccccttgaaggcaaaatcttcaaaggcataaacagagatgttggtgctggaagtagaatgcagattattgttaatgggaggcagaacacagaaagcagagagaccagagatagattagagaatgtgattaggctttatagagtgagagcatgcaagggaatcagaaggcgatcctttgatcttactcgcaattttgacaacagagtataaaaaaaaactaatgtaccctggtgccaaaggctcctcgcaacgcgaaagtatgggggagggtcattgtatgcaaccttatccttacatatgcaaagaggttgtttcccatgatcaactggtcactaaggcacgactttacagttgtgtcatggctcaccctcaacaacaacactgagtacatctaccaaaaagaaaaaccaatagaactatgctatatgttcacatgtttgtcaaaactctgcaaaggagttttatttccccattgttaaggaaagggagtgggtatgtttgaatccaaaaagttagaaaggctttcatatcctttatatgcattttgttttatcaaagggtatgtttgataaaacaaaatgcacgaagaatattgcaaaaggtaggaaataagaattctgaattgaacaagaaattcggatcaattaaaaaaataaaccaagtgcaacttgaattaaacaaataaaaaaaaaaagaatgaaccaaagtttaaaaggttttgctatgaatgactggagtgaatgcgtggattagtttgtagccaatagatatattattttgtaagattgaaaaaaatcattgtccaaagattagtaatgtaagcaatgactaattgcaacacccaaattcaaaacatcttcagataaaaataatatattaataatggattataagacctaatatcctacagtggaattagaatcttgagctttaatatgtgaaggaagctaaactgctaaaggcaacctgtgcaggaactgaagtacagtaagcttaagaaaaccttaagggaatacagaggccaagatatagacatatatgcttctgcttcatcatcaaataaaaggaaatatctatcaaatatattttttggcagccaacttgttgtccatgtgatcattccccaatcatgggaagctttttggaggcaaataagtaactagtattggaacaaaaattagttcgttcattgttttatttatttatttatttcaaatggattccaagtgatttgactccccagcaaaaccctgacaaggtaagcataaacccagtagagtagctcgttaagcaaggagaaagaaatatgtaacaacgaggaagaataaagatggtgaatgaaattaatgtggaaataaggaagtgagaaagaagcatagagtagaacctagtttggtaaattcaccggaagcgagtgcatcgacatagtatttgtcattgtagcgaacagggaaaagagcgagattgagctttttgagctgcataaggttcttgtccctcaccccatcaagtgagatggagacttcacgcccagctcccattctacaaaaaacaaaagcaaaaatgttagcaaaagcagagaaggttgcatggcatgggagaataatggtaacggaaatgaatcttcgcccaaactcaaaatccaactctaagagttacctgaaagtaaattcaaattgacgaaccacacatacctagaaaacagagagagagagagagagagagagagagagagagagagagagagagagatgcctcagcctcacctcggaaacgtttgaatctgcgagtgaagagtggcgtggcggtggacgagagagaaaaacctagacccggggtacttttgacattttacaatttcatttttccttttccgaccttttttagagtactgttttaacattaaaaatcttttattaacaaaaaaataattaaaattatatatatatatatatatatatatatatatatatataaggttctgaaatcaaagtccttacatttacctaccttgataaataagtacattacaaaagtgaaataaagagaacaaaaaaaaagtgaaattgaaagaaaaacatgtattattaggaataaaaaacaagttaaaagctttttctcctcttatttgtaggggtgtttattaattggggttggatgtcactgaattcatgattcaatccaaatcaacctttagatattaattttaggtactaaattggatttgtatatatttctttaatccaattcaaattgaatcaagttgcaaatgggttaatttaagtttgattaatgatgaaaaatttaaatttattttaaatttcaatgtagttttaaataaataatatagacagaaacaatcatacatattacacaaatctaggtccccattctattacaattcaacacttcaaaattcaaccaaacacaagacaattctaatatttgcacctacattattcaattgatttgcaacatcatgtgggacctgaactttcatcctgtccttaaaaatttgtttaccattacacaatacatacttaaagaactttacagggttgttatcactaataataatatttttttaatttaaatatatacatatataattattattttttattaatcaaccgaaccaacaaataaagttcacatttttaaaactaaaactcatgatctactttaatcatgaatgagttggattaagtttgacctaaacactcaaaaaaaaatccaacccaaatatttgactaagttaaaatagcaaatgacttataatcatgaacatccttatttattttgagttataagaatagtggaaataaaaaaaatatatgaaaaatattttaaaaattaaattatttattatttttagaattaaattatttattatttttagattagaaaacaatgaaataatgttattttatttcattccaatttaggggattttttttcagtacaagaaaataaaacatctctctttatttttcttatccccacaatattaatttgatatttatattttattccttttaatatttgtgtggattcaatttctatagaaacaaacaaaagaacaaaagagacttaaatctaatgagagaatgatactacacttttggagggcatttgacagttttttttatgccaaaaaaatcatggttgttgaaaattatgaattttattgttaaataataaattctgaaaatgataatttttagaaataattaaaatttgtttgattgattaaaaaaatatttattcaggttttataaggaaaaaaggatttgcatacatgattttaatagaaatttctcaaagatacaactaaaataaaataagatttagggggcaaatttctttgcttccaaccatttgcaatctctaaacaataacagttgcgctcccagctctatgctccatcaaaatgccatcgcttctgccaccccaattggaggctactattatgtgaaacaggtagcagccgcaagaggtttacttcttaattaaaagtcataattaacttatatatatatatatatatatatatatatatatatatatatatatttaaaattgaagttgtataattattttttaattattttatgattttataattttaattattttttaattttaattatttttttaaaaaaataatgacattaaagttgtataatttttttttaaactaaaataatgacttcgatttgatattttttatctgatttaagatttcaaaatcgtaaactaaagttttttttatgatttcaaaaagtcgtaattttatttatttatttatatacttagtttgtttttttcaaataatttaaataattttttaatttaattatttaataaataaatgtatttttattttttagttttatttaatctttttatatttttagatatgattttatttaattttttttatatttttatatattttttactaatattaaagaccattatttattttgtaaattaaaaaataatgaaaaacttaaattagaaaaaccttcgatctaactgagttgattgtcgaaattctttgtacaggtacttcattccataccagaataggagaccgaagatcccactaaggccagaaaaagagagaaaaaaatagataacttgtttagaactaagccgaaacaccttcatatcattactataattgggaatgcaataaaaaactattggactaacatataattaacatataatgtagatgtcatagctaaggaaggagttaaatcccaacaacttttttaatccatgtattaattggtatatttatttaaacacggattttttaaatatctaatcatatttggattttactattttttggtctgaccacagacatcttctactttattggacccaaaactaatatcactcatgatattgttactgctcgctgaattatacccattgaagtagagataattatgattataaatataaaaaatccaagataagagtttaccgcgtcgcttggtggtaaataaaatgtactgtatttaattttagtaaagccgtttatgtaaattaaatagtcaactcctgtattctgcataaatcgagaagacaaaaacaaggtagaattgcacatccaaaccaacgtaagaggttgattggatttccatgctttcttctcccttttgtccccagataaataccaagtggcaaaagtaaaattaaaataatttatttatttatttataactgcaagtatttgaaaggaaggaagaccttatcatctgggaatttcattttcagagcttatatcgaatcaaattggagtgtcggaaatccaatccgaagcataatgccttgtgcgagcattgtctcagctccgtcctacgcgttcccttttcgctctagctccgcttccgctacttgtatcactccaactacgatctcgctcactaatcgccgttggaagccacctccaatgagaaaaggcctagtgcgagccaccctttcgatagagaaagagaccccggaggcccagcgtccggatacgtttctcagaggagtggacgaggcccagtcttccacttcggttcgggcccgcttcgagaagatgataagggaggcccaggacaccgtttgcagtgccctcgaggccgctgatggtggggccaagttcaaggaggacgtttggtccaggcccggtggcggcggtggcattagcagggtccttcaagacggtgccgtttgggagaaggctggggttaatgtctctgttgtttacggtgtcatgccacctgacgcatatcgtgctgccaagggtgctcctaccgatcaaaaacctggtcctgtgcctttcttcgctgctggaatcagctctgttagtatctctctaccatctcaactcatttttttttattgcctttttttcttggactaattaattttccctcattgtctttctgttcaggttttacatccaaagaacccgtttgcccctacactacatttcaactatcgctattttgaaaccgatgctcctaaaggtaaattacattttgctttgctcatttccaagctcctctttttatcattttagcagtattttttgtcatattactttcaactcatgtgatgtgattcacaatttctttttatactgcttctttcatgcctgtctttttgcttcctgttgtttgggctttgtttgtgtgcttgggactgtttaatctttcattactgtatagaagctaatatgatctgatatctgctccgtctttttcaagcttggttacctcgggttcaactttgtaggtttttttttcttttcaaattactatttgttatcagttgcttatgattaaatcacaactatatatatataaataaaaacaaaaaaacaaaaacacaactatatctatatgttcgtctcaaaatcttaaaacaaatattaaaccaaagagatgttaacataagagcataaagttgttgaatccttttttaaatatgctgctattgatagtcaagctgttgctttctgcagatgctcctggagcacctagacaatggtggtttggtgggggaactgacttgacaccagcttacatttttgaggaggatgttaagcacttccattcagtatgtgcttagcacaagtattggcttctgacatttttatggtttagaaccaataatggcttttttacttggtaaaagatgaaagaaaaaatcaatttcctttgttctaaaatgtcaccacaccttgatgattttggtcctttttgagagtacctttaatatatttttgtagttttaggtgggttttctttagttgaatttatgtatcttggttcatttaaaattggaggcattgaaatgttaagcaccgaatttgtttctctttatatttctatgaaaggttttggcaaatgcttaaggattttgcaatcaaggcacttaaaatctctcttactttaaatcatgcttcttatgtagattcaaaaacaaacctgtgacaagttcgaacctacgttttacccccgattcaagaaatggtgtgatgattacttttatatcaaggtataattcttaatcctttttcccacaatgaagcttttaatactgtaatttttagcagtcttaggatctgtttgataaaactaaagtctaaaggttaacagtgatgagtgagtattaagcattccatgtccagttcatgtacctttaatagaagtttactcatgaatttggctttctgttatatttaattttgatgaatttaatatatgatgaattggaggctgtcataattaataagcaagaaacaaatggtggtaaatgggtaacagcaatgactgtcagtaataatgaaatgatgggaatgggaagaagatatgtgatgcaggggaagcaagatgatgactatgcaattatgatcgtggtggtagtggtggtgatcatggcgattatgctggctacagtgacatcggacagtgttgtggtggtgatggtggtggaacaaaggagttgcacactgtgagatgaaggtgaaaagggaaattttatctatgtaatcttatttgttcagaatcttactctccccttaggataattttcgaattaatgaataagatatgatgaacaaataggaatagaataagtttatcatatctaatcgactcaccaaacaatagattaaaataggatatgatagcttaccctatcttatcttctttatgccaactacttagtgtccttaacacataagaaacatttgatactttcttcatcttataaataggaggattactaggaagatgttgtcggaaggtttaaaattgttaatctgttttcagtctcttgtttgtcagttgtcatagacagtgctcccgtttgagtataccggagttgagtcaatataacacgtaatttgatgggccatggaggccatcttttatgtttaaggggttagagtggattcattatacatattttttaaattgaagttgagtgcatgggcatatgctgttgttggttgtttttccttatcttcctcttatttcttacattcagcatcgaggtgaaaggcgagggcttggaggaatattttttgatgatcttaatgactatgatcaggagatgctcctttcctttgctactggtaattacttgcatttataaatctgatggttctcactggaaagacatataattctctctatctcatgctgcccaaacaatggttgcttgcagaatgtgcaaattctgttattcctgcttatttacctatcatagagaaaaggaaggatttgcccttcaatgatcatcagaaagcatggcaacaattgcgaaggggacgatatgttgaattcaatttggtacaccttttaacccaactttagacttaaaatgtattgctctactctttcaaatcagatttgtatttgtattatataacatttttggccacaggtatatgataggggtacaacatttggactgaaaactggagggagaatagaaagtatacttgtttctctcccactgactgctcggtgggaatacgatcatgtacgattttggaatcttctttattttaaacaagttggatgttagatgacttaaattttccatttatgaaattgctactgaaatgttggtgaccttttgtatgcagaaaccagaagaaggaagcgaagaatggaaactcttggacgcatgcatcaaccccaaggaatggatctaattcatcagttgacccccaatttgtcagctttttaatttaataataagagagcttgtttcttttttcggtgtatatcaactatcaagtgcttgttatgatgagtcagaatgttagcttgttgtactaggtggattgtaaatcacgtgttttgctagagtcatccgtttaaagcgtgaaaatgcagaaaattacaaatgtctaggatgcgtctgtagtatacctactgccaaccattgttctttctacaagtaactcctcaatgaaaacaaaaggcagcttctttaatgccagtattgcacaccacagactagtaaattggtaattctgttgaaggtgatatcatattttttactgaaaaatctgtgcgcaattgctgaatgtaagatcctttaatttgccacatacatccacttttaatgaactcatcgaacaattattaaattaaatatttcataaagtgataggtatggcctatggtgaagaataaaataaaattcaaaagtaaattagtgaaaatgagatttaattgggtcaaaatttacatcatgcattgcactagcatttagcattcccccacccccaccattgtcaatatatttcttagcaatggtggaaaaatatacaaagaagcacacatcgtttgcaatgcagcatgcacccttctccttactacccccaaaaccaaaaggcaaaaaaaaaaaagaaaaaaaaaaagacataataactccgtatctgtcactcaggccaatcgaggaacttgcggcccagaagtgatggtggcaagtaagtttgtgttgcggtgggattgtcgggagtgtagatgtatcccttcccatatccaatgtccttcattaatttggttggagcattcctcaaatggagaggcacaccctcattctgtcccgcggattccctcactgccttctgagcggctcctatggctcgataaacagcaacagacttaggtgccaaggccaagtaagcaacacactgagcaagaatgacattgcattctggcattcctatgaagtggcatgcttggtagcatgagactgcctgattaagagccaatggatcagccaaaccaacatcctcacttgcaaaccgtatgagtctgcgtgcaatgtaaagaggctcttcacctccctctaacattcttgccaaccaataaatagctgcatttgcatcacttcccctcatagacttgtgcaacgcactgattacattatagtgctcttccccagctttatcataagcaacatgcttgcactgaagtgcctcctttgcatcagcaacactaacaacaacagcagcagcagcagcagcagcatccttgcattcctcgttcgtgtgaagatccaattccatcccttgttgtagccttgcagccgcggtaacagctgcaatctccaaggcattcaaggccacccgagcatccccatcacagttgttgcttatgaaatcaacaacttcctcgctcacatcaacatgaacccccacgctctgcatcaacccttggtcagtgtgagtgacagcgcggtttagaagcaaggcaaggtgatggggttggagagggttaagagtgaggacgcggcaacgagacaagagaggggtgatcaaatggaaagaagggttttcggtggtggccccaaggaagacaatgctgccatcttcaatgacgggtaagaaagagtcctgttgggacttgttgaacctgtgaacctcgtccacgaagagaacggtgggttggttggatttgagtctgagttttctggcctcgtcgacggcgtccctgacgtctttgacgccgctggtgacggcagataaggagacgaagcggtaagagttaatagaaggggtggagttgacgatggctttggcgatagtggtcttgccggtgccgggtgggccccagaggaggatggaggggaggcggttgcgttggattgcggagcgaagaagggagttgggagcgaggagatgctcctgacctacgacgtcgtcaagggttctgggacgcaaccgctcgtacaagggttcgtgaatgtggctgttggcgtgtttcttgtctgcgatcttaaagaagaaagagggcgagtgttgtggttgtggtggagaaggagaaggagaaggagaaggagaaggtttggggcgcttggagggttcgtcatgttcttgtgattgtgactgggaatggaagaagcgatcgagcttgggctggaatgtggaagagttgggtttctgagagagaatccattcggtggctttgacggtggatttgccgccggtggcagccaaggcttgggcggctaactcgtccgggaagcccatactgaggagttgctgcatctccatcttcttcaatttgatgcaaatgcaatcttctcttcttttctttattctcacacccttctccttcctactttctcggggctcgatactaatcaacggaggatgaaaataattaaaattttaatattttagtttaggtatgattttttttacatgtttaggtatggttttaattttttttattttaagtttttatcttttcaagtgtttggactacgttttttattctatttttttttacttatacttttgtcaaactcaaatataaacaaaattaatttatttttagctaattaataatacattcagttctataaataaataaaaaatatttaattcgtcaaaataaatgaaaatagataaattaattttaattaataatatcataaatttaaaatttattttaaatatgcttatagaactaattagtttaaagtgacgattgtatataacaacattactaataatttaagaaataatgagtatgagatataatgttaatagtttgataaatgcatttactttcatgcaaaaataataatatctcaatattgtatttcacaataaatcaagaccaaggatatcaattattaatacatttcaaaacaataatatgtttcattctataattaggaaaaaaatattatgatttgtttttatgtaaaggatcggaattagtattaaaatttaaaaactattttttaagtgtctttttaatttaatattaagaataaaaaataatcttcgattaaaatttcaattaattaaaaattatttttaagatgatattattaaataggatgcaaatagttaaaatttgctttcatcaatccttttttttttccttttttaattaagtctggagggagtaaaatataacaaatgtattctaatgggtgtcaatatttttttaagtaaatcaataaataataaaataaaatagtgtgtgataactttattaaattttacaataatcattgtaaaagttatattgataatgatttttaattgtttgataatataaaataaaataaaaaacttttacattgtggatgtatgattattatactcttatttgtttaggtttattatccattttatccttataattacaatatatttctcttttagtagttataaacattctattgtgatcctataattagaattgatgaagtagtaggacaattttactgtaattatatggatagaagaggtaatgatgtgagtgtgacaacaaaaggaaatagcaataggatgagggtcatggcttctacggttgttcctgttcctcctgttcaagttgagggcggaaagccaagccgcggcgttagcattcggtctcgcctaagcaaactgtgccaacagggacaacctcacgtggcacgccatcttctggacactcttccacgcgcctccaccgctgtgtggaacaccgtcatcatcggcttcatctgcaaccacatgccgttggaagccctccagctctacgctgaaatgaagtccacccccgacaccccttccgattgctacaccttctcttccaccctcaaggcctgcgccctaacccaaaacctcactgccggtaaggcccttcattcccattttcttcgctccccatccaactctcgaatcgtctacaactccctcttgaacatgtactcctcctgcttgcccccccaatcccaacacgactacgtcctcaaagttttctcctttatgcccaacccaaacgaaacgtcgtcgcttggaacaccttgatttcatggttcgtcaaaacccacagacaccttcactcacttcgcgccttcgcaaccctcattaaaacttccattactccgtcgcccgttactttcgtcaatgtcttccccgctgtccctgatcctaaaaccgctcttatgttttatgccttgcatcttaaatttggtgctgactatgtcaatgacgtctttgctgttagctccgcaatcgttatgtttgctaatcttggttgcttagactatgctaggatggtttttgaccgttgctccataaaaaatacagaggtttggaataccatgattggtggttatgttcaaaataactgtcctcttcaaggggttgatgttttcgttcgagccctggagtcagaggaggccgtgtgcgatgaggtcacttttctgtccgttatctctgctctttcgctgctgcagcaaattaaatcggctcatcagctacatgcatttgttctaaaaaaattggcagttactcccgttattgttgtcaatgctatcatggttatgtactccagatgcaattttgttgacacttcctttaaggtttttgataacatgtctcaaagggatgctgtttcgtggaatactataatttcttccttcgtacagaatggtttggatgaggaagcactcatgcttgtgtgcgagatgcagaagcagaagtttccgatcgattccgtcaccatgatggcccttctttctgcggcttccaacatgaggagctcttacattggaaggcaaacccatgcatacctaattcgccacgggatacagtttgagggtatggagagttatctgattcatatgtatgcgaaatccaggttgattaggacttctgagttgttatttgagcagaactgcccaagtgatagagatctggccacatggaatgctatgattgctggttatacacagaacgggctcagtgacaaagtcattctcattcttagaggcattagttcacaaggtaataccaaatgcagtgaccttagcctcgattctcccagcttgtagttcaatgggaagtacgacctttgctaggcaacttcatggatttgccatacatcatttcttggacgaaaatgtttttgtgggaactgctttagtggacacgtattccaaattgggtgcaatcagttatgccgaaaatgtttttatcagaacaccagagaggaattctgtcacatacaccacaatgataatgagctatggtcagcatggaatgggtaaggaagctgttgccttgtatgattcgatgtgagatgttggattaagcctgatgcagttacttttgttgccattttgtctgcttgcagttatagtggtttggttgaagaaggtcttcacgtatttgagtatatggacaaagtacataaaattaagacctcaattgaacattattgttgtgttgcagacatgttagggagggttgggagggtggtcgaagcctatgagtttgtccagagattgggtgaggatggtaatgcaatagaaatctggggatctattcttggggcctgcagaaatcatgggtactttgaattgggaaaatttattgctgaaaagttgcttagtatggaaacagataaaaggattggtggatatcatgttttgctctcaaatatctatgcagaggaaggagagtgggaaaatgttgatagtgtgagaaatcagatgaaggaaaaaggtttgcaaaaggaaatgggatgtagttgggttgagattgctgggcatgagaacttctttgtatccagagatgagaagcaccctcaaagtggtgagatatattatatcttggacaaattgactatggacatgaaggatgctggttataagccacgcaacaattccaatttaaataggattttggaatctagtgactgaaatgaatgtgttatgacaaatattatcaaagtgagctgttggttgctctgcagtgggcagctttcaaaaaattgagtttggttcgttgttacacagcagtcataggattgattataaccaatgatagtttcacgaccagcataagttcatccagtgtacacatacatgactagaactgttattgttcattcatttgaaacacttctttcagtgatgaacaactcattcaattcatgtacagttgaatagtgtcacaagtttcatcctaccttttactcctgatacaagaaatggtgtgatgattactgttatattgaggtataattctccagctcagccttttttacataatttggctgtagtcttgaactcttggggcttgtttgataaaactgaaaccgaacaattaagagcaaaagtgttttgtgtgatagtggagatgttatctcatgaagaaatctgtgaggttgatgatgcatttattcaagactcttggaattgtggtgttataaggcaaacttgcaactatgattattattgagtcttacccctaagcattcctgtgataggcggtttctcaaatagtttgattttatttttcaagcattgtaactgtagtggtagatatattggaaagcatatgggataggatctcattagcattatttggcttacaaaacgagaccagccagttttcatgcacaatggtcctattttagagaatttcatttccagtttagtctgtatcatagttttaaatagcgggtagctgtcagtagcaatcgacctcaaaaacgctaaagcggtatagcgggtagcggtaaaactgctactgtgaaatctattaaaaatacttataataaattatattacatatataaatgttataattaagaaattacccaaaaataggaagaaatgaggaatgaaaagtataatacttatattttttattaatattaatatattattaataatttttaaaataaacaagcttattaactctaaaataaataaataaaaatatattttttattaatattaatatattattaatatttatttaattgtaccttcatattaaaagatttatttctctatataataattttcttgtttataaacattacttttatttaatctcttaaaaaaatgtttagtatagcattaaaatgaataaaaaataggaaaaaatattttgctttaaatggtgaataaaaatgagtgttgacattgacagaggaagtggagattgcagtgataaaccatttaccaaaacccacatgccacacccactttctctcaatattgtgtcagtgataagccttatctcattattatcttctctttcgttcttcctcgatccatacccataggccacacccactttccctcaaccctctctcccatgacctcctctccccctcctctcgatccccccactgccatctccctcgccctcgtccccatccctgcaccaccctcctcccaccatctccctccgtcgtgctggtcccccgatgaaaccctcgccctcattgacgcctaccgcgacaagtggtactcccttggtcgcggcaaccgggcggtgaggggtcggcggcgccggcgtatggatttgacgaggcaacggcaaaggagctctgcaactcgtcttctctgcaacccttaacttatttttaattttcaaaacactgcccgccgatggctaaagctttgcaattttttctcttccatggaaatagcggcgcgatagtgccgcaagatctgccacccgcaacgccacctccggaaaccgtcgcgttgcagcatagaagtagcggctggggagatagcgcactaaaacgccactattttaatctatggtttgtatcacatgtaaataagacggatgccttctgtcatgtttaagtagctaatgtattcactatatatttttttttcaattgaaattaagtacattgcatgtcatatgctgttgttgattgtttttcttcatttttcctcttaaatataaatccagcgccgggatgaaaggagagggcttcgagaaatatcttttatgatcttcgtgactatgatcaggagaaatattcatgcatggctacctgtcgtgtaagcagcacttgtggtgtcaaatggtatatagtttcattaccaacactgcaacacactgatccagatacggtcatcgcggttgatcataagcttggcaaggaaggaataaattaacaccactcggccatcttacttcatcttcgtgactacgtaatgaaataataatatttggagattaaataaattcttttctttatagaacgtgaatttgtcgggaaatattgcatgtctaaatcaaaatctatgctgattggggtgtcaacaaaaaaacaagttatggaccgcatcattttatcatgaaccgctatcacctatcagcctgtgacattggcatatgtggacatgtgcgttggctgtcctcaataagtgttatttggactgcacgtgaattgacatatgtggagattgtgcttccactctagactaaccacagtataagtcgctttccaaaacgtcagagaatattagttaactaaacagaatatgcttgacacatgatcttaattataatattcttttttatttttttaacaacaatgttattaacacacttcttcgttaaaaattaatttttgtgactgatgtaagaatcacaatgatatttaccatattcttttaatatttttcttccacgaaataaaaatatggataaattatcatttttatctttaaaagtgtttaacgctaacaaatttattcctgaatgttaaaaatacaaaagttagttcctgaaaatgtaaaagtgagaaaaattcattccaccgttaactttcgtccattaacattaaggaattcacctacgtagctcgtaaggacaaaaatgtcacgaaataattgctcacatgacattcattggttgaacctgaggcgatgactcgtaggactaaaatgtcaatataattttttcttgtgttactacttgagtcagactcaaaacacaaggtcatttacccttaatttgttaagttttctcttttcaccttccccttctcgccttttgagacttctgacgacttccatggctaccgtgaaggagcaccattcttcttccactgaagacgaagctttgtatatctttgaaagacaaaaatgtcaataaattatttaatttaatgacgtatttgtcagtaacttaaatgaatgaaggtaagataaaaaaaaaacacctagagaggaagaacaagaaactcagtccttcattcttggagaacaatatataagatagagggaaaaaaatagtcattgcaagtctaacaatcaaaaggagaagcaataaaaaaaatcattactaacaaattagtctctatgtccacgtgataattctttcatgacactttcatccttacatgccatataagcgaactgactaatattaatttattaacatcacatacttttaaaaacaaacataactatttaccataaaaacctattaaaataatgtcaaatattatgatgtacaaatactattacccaatataataaattacactaggtaacaaagccgaaccccttctacgccaacacctaaattcaccaacattccttaaacatttttttattttacaacaaaaattattataatctaaatttaacttactgacgctgtacagatctctaccttaaaaaatatacatcacattaatctaaaaactaacaattgctacttccatttaaaaaaatatattttttgaattgtcgctgtgatccaaatgcatatattatgcagtcatcattcaagactaacaactcaaaaacaaaagattaaattgacaagcacaggatttcaatttcaaagtacaaagcaaaagtattcctcaaacatacagattaccagtaatagacaggtcggtcacgcgtacacaaacctgaaattgccaaccttcagaaaatggaattcagatcaagaagatcaaaatttcctgttaaaacttaggtttatgtttttcttttctattgtacaaaaaacaaaaaagaaagaatcaaggagataaaaaatcgaacattcaacgtaacagcaataaaaatggggcttagacataaactatataacaggaaaagtccatcaatcacaccaagcatcatgcccaaaaaaaaatggcaacaactatgagtgtgtttgttttactgaaatcgtacattccgatgcacattcaacgggatggcagtatcaaaagattggtgttggatggaactaacaccaatccaaacaaaccctatataataggatctcatcacttagtggtttgcgcaattatattacttaatgaactggtttcctcctgagcagtctccaccaatgaatcctgaaaaccaaattcatatagaataacatcagaaaaaacttttgagaaagaaactgccaaccaaaacattcccaaacaagaagacctgtgcagctattaaccttagattaattatcatcaatttaatttgaaattataaataattaaatcatgatagcagtaattataagttaattgttatcaaggaattatgataagtatacgaataattagaatattaatataaagataaaaaattagttaagttttagatttttttttaaataccaattttaaagttgttatttttaaaatttaaacaaactcatcctcaattatggtaattaaaattactataaaatcttcatttttataataataaaagtaattgatgatgtgggatacgccaacgtgataacagtggcggatgagaacacttcttgagtgaagaataaaaaaaatgtgaattttgtgtttttcttatttgttctagatttttgaaatatttttaggattttctttattttaacatctttaactagtaaataaataaaaaaaaatcagaaaaacgatggtggtaggaggagaggggtaggacgagagggagaagtgaagttgtgaagaattgggagtaaagatagggagaaaaagtttagaagtggtgaagaattgtttttattttatttttgtgtttcaaactttcaatctggatttgaaattgtataaatgttggatttggatttgagatataagaatttctagcccatagaatatgtttataatctttaaaaagttatcctagcctttgagttgccataaaatgaattataataaaaataaataacatatcatcatttaactatggaataaatgaaaatgatctaaacattggacatagaaaaagtagaagtgtcaaataagtgtgatgaatatagattgatctatcataagttgagtgttaaataaccgaattaatttaactcatatttaaatgagtcatgaaaatatcaactcgatatgattcactatgaattagtgggttagataagttgactcaccaaatttataaaaataaaaagtaaattctaaataaaaaattaaaacatttttcattttttttaaaataattttttcatcaacgacatttattaattcaaatggttcaaatacgaatgcaaataataggcaaatgtctcaaataatcattcaaacatataatattatcattcaagtaataattcaaatgtcttaaattcctaaatatcattcaaaaatcttacaataccaaagtcttaaaatcaaattcaattgtctaaacatcatgggttaagtgagccgaattacaatttcatcacattgcaaaaaaaattaatttttcatctaggcgggttatgctttctacacccagcatattttcaatacatttagcattgtacagttaattttcaaaaataccctttgtaaaaatggacatacaccatttatctttttcttcttctcctcttgtctgtttttgtttgcacaatgttctctttcttctccaccttcaccattcgttcgtgcacccaacgtcgtggttcgtatgttgttttgttattcgtcgttgctttcattgatttttgtcttctctgccttgagtttttctcattcgtttgtgttgaatatttacgaattgacaatctgtatgactacgaattaccaatccgtatgagtcatattgataatcaatccatatgacttatacagattgataatccgtacaagaataaaattgtaaataaaaaatatactgaatatattaaaaatatgctgagtttaggaaacataacttacttatgcctcaccagattcggcctattttgatatcaataaaaattgttgaagaacgaagtctttaaaaagttgaaggaacaaaatcatgaaaatgaaaaagcattttttataagagaaaaacatagtttactctgaaacaatcgtttagtactcttcttcgtcttcgttttaagaaaaagaacatttcggaggaaaacagtgaagaaaaagcgcataggacgtttgcgagcaaaattgcgatttatttattaccaaagagaagaaaaaaagagaggcggagcggaggagaagagaatagaagaggcgaatggcagatcagagcgagcattcgaaaacggcgtcgcctccggaggagcaggagcgtcccgttcgggtgtacgcggatggcatctacgatctcttccactttggccacgctcgctcccttgagcaagccaagaaatcgtatgcatcaatcatttcctaatcctcatatgatatttgatccttcgctttgcctccgagatctgataatagatttcatttatatcaatccattaattaatagaagtcatttcttcaaggttccattcacagacactcttactttgggattttaggtttccgaatacatacttgcttgttgggtgttgcaacgatgaagtcacccacaaatacaaaggcaaaactgttatgacagaggccgaacgatacgaatccctgcgccactgcaagtatgatattttgtttgttgttgttgcttcaaccatttgaatttgaatttgaatttgagtttgatttcattttgagatcagatgggtggatgaagttattcctgatgccccttgggttatcaatcaagagtttcttgacaagaacaacattgattatgtggctcatgactctcttccgtaagattaatctctcaacatcaacatctgaatctagtaacttcattgcataatataatcatcttttttccccttgtcaacccgttgtccacagttatgctgatgccagtggtgctgccaatgatgtttatgaatttgtatgtatggcaaaatttttttttttttttttatttcgttgttactttctcctctgacttatactatgtgccgtgaattttgtatgtaggttaaatctgttgggaggtttaaggaaacaaaacggaccgaaggaatatccacgtcagatgttataatgagaattgtcaaagattataaccaatatgtgctgcggaacttggatcgtgggtactcaagaaacgagcttggcgtgagctatgtgaaggcatgatttgacatagatctctttgatgtattctactttaaaatttaacatgatacgtctttcagcaaattgtttgtccttatattgacgccactctttgttcctttggtgaatgctcttgtcccttgtggttgtcattactttgtcataaataggaaaagcgactgagggtgaatagaaggttgaaaacattacaagagaaagtgaaggaacatcaagaaaaagttggcgaaaaggtatgtattgctataacatataatttaggtaatcaagtcgaattaatacttttgttaggcaacatcatgtgaattaaatgggatgaaagggctgtaggatgaaaatcacatgtagattgtaaatttgtaatgtaatgactgttgaagtaggagctaagaatgtcaggtaaagtgctttgaaaaattcatagttaagtaaaattgtcattcaaactgttatgggacattgggcatctgctactggtttttggattcaacggtttatcttcacaattttgtctaagtattgcatttgtggatctcggagtctttttcaaggacaaaaacatgatcaaggagtaaaatcaacaaaaaaaccaacccaatctgaattgacatatggctatgttgttttaattgttattttgaaccatgcagtctgttttaattcggaatcatggagtcctaacattatcaaatcaattgaatataccttctcgaaaattgcattcctcatattgtgctaaatttcattatatatatataggtctttgttttcatatcctctgtatgtttttatatttaagtaaatgtattggcttcatggatcttcttgctgtttgattactattgtgtaattagagaagggtgggtgggtgggtgggtggagaggggggagagaactttgcagattgaatttcttatttttcttaaatttatatctatatatttttttcaatatagttttaacttatcattgtaattttagtgtgacaaacctggatgaatgagaaaatattgcttttaatttctccccatttttttgtcaaaccttcactgtcgggcatcacagatcacagtttcactggtaattagtggttgtatgatttattgccatgaaactgatatcagtcagttactagtttgctttggcataattctctattgtcagctatacatctgattccaaatatttcttgtttcaatttttttccttgactttattaggctcatattaatatttggccaacattaaaattctttgcctacacggaaaagatactagagagtgaaaaaaactatggactggctttattgtagttgtcttgtaaaagaaaaatagagaaatgatactatttttgcatctctctctctttctgagtttgtctttaagaaaagttgtgtcttggtgacttgttggttatggggtcgaatccggaaacaacttatttgcatatgcaagggtaagactgcatacaatatccctccctcttacttgcgcatagggtggagcctccggatattggggtacgtagttttttatttatttatttattaggaagcagctttcttaaattattgattttgctaatgtatatcggggtgtgagggagatgttttgttaaattgaaagtgatgaaactaatctacggtttttgctttgtatatagcagtatagatgaggctatggtttaaaacctatgctttttacataataagtggacattagtattctcttttcaacttttatgtacgcttaatacttaatatataacagtatcatacattgaaattatctcggttgtttttaattgaattatcaattatggtaaagatacatatctttgtgtggtttatccagatccaaattgttgcaaagactgctggtatgcatcggaatgagtgggtggaaaatgctgatcgttgggtagctggttttctggaaatgtttgaagaaggttgccacaagatggtgagctaatttatgtgaaaaagctatgcaactcttctaatgtatgtaaacttcttgttaacttctcattttttatttattgttaccacttggatctacaaacagggaacagcaattagggatcgaattcaagagaggttaagaggtcagcagtcaagagatggcacacttcgtctacaaaatggcaaggatgataaggacgacgatgatgaggagtattattatgatgaggaggatgatagtgatgaagaatattttgaagaatattatgatgatgatgagcttaatcctcaaaataatggaagagatgagaaaaaagaataggtatacttcggtggagttgttgggttctcggcagaatgtcaatagcaactgtccgtgcgatatctgtaatattatatgcattatgttggatagtggatttgaagttgcacaagggaactttcattttgctggtgtggtcaaaattttgcgtgttgaatgctggtatacaagaaagtgttgtttgtgcatatgcttaattttagatgggaaaaataccatatcctttttattcacttaatttcgggttctactttctttttcagcgttgctagctccgggaaggaaaatcacaacttactcgtacaatctaacgtgaattttcatgtcccattgaagtcatcaattatatcttttgcatattgtaggcatcatacatgaattggatatatgtctttagaattagtttgaatcatgtgattttataaaattgattttaagttaatgtaagatcagtcgtatgatttttttccgcgtatatttgaaaattgattttgacatgtaatgtttaaaataacacaattcaagatagtgttcatacaaaaaaaaataaaatactttcaattgcttccaattaaacttgaatttgaaacacaattcaagatagtgacgctctttttagattttattgaaaattataaattttcaataaatttaggaaagagaaacattaattaagaagtaaaatttatcaaaataagtgattttcaataaattttaacaaattacaaaaaaaaaaatgtcgttaacactcctcttatatcaaacatcatcgtcaactgaaaaataatgtttgactcatcctaaactcaaagatgaaataggtccaaacacacttgttaacagctacttaatttcaaataaatttattttttccacaccatggagattttactattataaagagagggctgcttcctgcttccacatttttcgttaccaaaggccagagagataatgaatgctatttatatataatacaaatttatattaactttcatgcaaaagagataataaaaaagtatataataaaatagaaaatggtatttggacagtatttcatttagtgcatgtttagttttacattaaaaattaattttgagtccataattgattttaggtattttttcacatgtttagttttcatgctgaattttttttataattgattttgaatccaaacttgattgagtagtatgttaaatttgtgtccataagtttacgtggatcaagttcaacataatgttgaagcagatatgcattgagttgaattaactttgagcaatttttgtattaaataaaaaaattatactaaattttacttttaacttaaatttaaaataaaaatatttaaacattaatcacatcacttcaaaatcacttttaatcaaaattaatttcatttaaaatcaattttgtcaactcttatcaaagaattcatttaatatatgttattgacactcatcattctctttttatcatatcatatctatatattttttgtatcactttcttataggtgtctaataatttaattagtgtccaacaatcatttttaagattaaatgacttatttgatcatttatcttttttatttatttatttcaatttggtcatttatcttttaacaaagctcattttagtcttctatcttttaaaaaaattatttattcatttattttattttttggttcaatttgattttttattttattattttgttcaagtttgatcttttatctttttttttcttttcaatttgatctttaatttatttaagattaactttatttatcatttaaaatgatttttttttcaattttctccctttttccttcacttcatttttaacaaaaaagttcgtttaaaattgaaacaaaaaattaagataaataaccaatttttaactaaagcgaactaaaaaaatcaaattatatttaaaagaacaaatgatcaaattaaactaaaaataagataaaagatcatataagtgatttgatatttttggaataaaataagtaatttgataaaaaaataaattattataaaatttattgtgtgaataacgttgttacagagagagataaaaagaaggaagcaagtcaacacacgtaaaagaatttgtaggtagtggcaggcctaaccgagttaccatatccaaaataattgaactataatcgggctaggactccctaaagagaaggtcccaattaagattaacatagaaaacaaatacacaaatttaaatagaaaaggaaaacaaacaaaagcttaagccgacgccgacacagcataaattcagaaaaagaaaaaaagaacatagctggattcgatttcaaccaaggaaggccaaaaaataagatagagctgaaaagtgtggtacaggtgcaggtggctgtctacactggaaatatagttccatttcacatagggttggtcaagaagttagcacctaaatatctgcttaatttatcgctgtcggaagaaacttaaaagctccttcctattggacagacaagaaagattcaagaagaagttgttgggaagaaacggccgccatcgtccacgaaaacctcatcagcacgatcattatttggagctgttgctgttgggttgctcagtctctgaaaaaaaccgttgtctccaccatctgtgtatgctaagtggttttgttgctgataaagggactgagaaggggccaacatgaggccatttgggttcacagggattggctgcccaaacagatcaggcgcagaaggggctccagtgaactgttgcaccatggcccgaaaattggtggtgtccgtgttcagcagagtggtgggagttcgccttgaggcccgggaacgccgtctaatgggctttgagactccgccttctgggcttagctgggccggcgcggcggtggttgtgacggttgtggcgtcggaaacggaagaggggaattggttttgttgatagaaatggagccagtgatcattaggaatagggccagacatggtagcactcatggagggaatgagaatgacatgggaagaaaaatgtgcattggtggcctatttatggttccttcttcactgtgctcaccttggtccttgtcataactcataagtcatagttacaaacgcaatgcaatatcctcgcccttcatttactgaccacgtgttcatgtgtcagacaataatatttaattaatagaaagaaaaaaaaaaaaaaaccttttttcttttgcagacactgaatttttcaagatggtttggtgagtttacaggaaacaagaccggatggttttagtagtatatcaaaaggacttcatggagatagaaagtcatcataaataatattcttcgtaatttggtttttaatggaaatcaataataacatgtgattcatgtagtgaataaaaaaatgttgttattgtattctgaacttttaattttatttttgtaaattaatatttttatctatttaatagaaaaataaatttcggcaccgcatatatttgaagaaaataattaattacacaaattattatgattaaatgacttctttttactgagatagtgtgattatatatgagatcgatgagatataatataggtgtgtatcatttaaatatttacgggagatactaataaatgaaaatattgatatcatttagaatgttggagtttaattagggaagagtaggatgatgttataatgaggtgtgattgagggaaggggggatgtatgtcatgagtcatgtgtgtttctttgaggatgcatccaggaagcagtctttgggatgaaatattgaatattgaatgacacactgtcaagtatctgcgacttcttctgtggttgtggttgtggctgacttgggctcttccttcaattcagtggactggacttcaaattctaatccaacttctacatacatgaaactcccctctaccttcctcaacttcccttccacgctaaacatcaaaatatttcactttatgcttcattattctaccacctgcttaccaccttcctttaatttccttcattctttaactcttcttacaattatatatttatattcctcaatcacctcaattgattaaccattttcttcaaaataaaatttaactcgccagatggggtgaaaaggcctacaattctgcatttcagcttaaacacaagtcatccatttaactattgtctacttctaaggctaaaactttctgcacctctaattatttcttcttgtcccccattgcattttggaatataattttacatttcatgttgtactttttaaaatgcaatgggacatgaaacgataattgaaggtgtaacaacctaattagccacacaatttatgagcttgtagaccaatggtctataacttgtaaaaataactttgttaatatattaaaaattaaaaataagtttaattattttaagtacctgaaaattcaccttattagccacatgcttatgtgaacttatctaattaacccatttttgtacaatttaaaagaaaacaagagattagatttaagaaataaccattatagtagataaaaaatataagttaacctttattattataaaaaatgctaaattacaatttcaattttcttttgttagtatatgagtttaaacattttttttcttcctacaatcatcaaatcaaccttgaatccaacggaatgactttcaaatctttccgaaaaaacatccttcaaattgtatgtattgtgttaagcatagatctcaaggataattttaaattaatcttaaataaaatcttaaataaaaaagtcataccactatagtgactcatcacctcttttataagtttgatatggaaataacaattgacctatattgaaggtgttttcatgtggcttaactttaatattttgaaattacaaaatacaattttgttaatatccgtttaattttaagtatttaaaaattaaaagcaatattttttattaaaaatatttattacattaaaatataaagatatataaatattttatttttcaaaaagagtttttcacatttagtaggtcaaaaccagcccttacatttaataaaaaaaatataggaaactggcgttttatttatgtttttttttttataaaaaaattatggttgaaacaatataaaaaagaggaaaaaaattgcaaaaaattgagaggctgaagactccaagaaaagtgtgtgtgagcgaggtgcagaggaaggaaagaggaaaaacgtagaatggagaatcgtgggagaagtggaaggatcataaagttggcatgtcacgagttgcagttggcgggttataatcgtgagataactattccaaaaaagcgaataatctttcgattttggttaattaaaaaattaattatctgaatcaaaggaaccctaacctttgttcggatcagtatcatcattgtcacccctctttcccttctattattataatgctaatcataattaaataaaaataaaaatataatataacacattatggcgtttgggcatttgatgccgtgactgtaacagttttgccaaagcgtttccttggatggaaaagagaggtgaccgtgctgatgctgagcttcaacttgatgccgattttgtgccggttcctgtccaggttactctaaatattttcttaaagaaatgaaaccctgggtttgttttgatctgaataatcgtaatgtgactactaaattaattctgtgctttcttttcattcaagatcttgtttttattttttgtgggggtctgggtgtggcagtgccaataatctgtattttttaaccaattgattagaattagattactaatgttttagtatttagattaactggatagactaaagtaattattagttatcacaccatgccatcataaaaggaatacaaacatgtccagctctgaattttttactttgatggcatggcattgtagacatgtactggaaatgaaaagagtaacaaggactcccagattcctcagtccagacgacctaatttatcctcactgcaaataccagcatggtccctagatattgcattatctacttttgcaaagactgatggtcctttggtttcacgatcaagtcctggttccacaagaggactgcccccaaggccaaattcagccaaagtcaggtcttcaatgagaggtttacttcctcataggagcttcaagataaatacctgttcccaggatattgaaaggacaggtctcatagttcctaacactcccccatcagatgctcctttggacaaaccttccacttcaactcctctgtctcttaataatagggttatctccccattaacaaaagtttcacattcattaccagttactccatttgcaacttcaggtgtagagaatggacatggaagacatctaggacgtgattctgatttaagtgtatgtttccagtgttcattctagtttcaagaccaaaacaactacttttacactgtacttattattcacattttgtaagtgaaaaatggcacatgttgcttaatatatgccttttctttttgaacagacaatggaagttcatcagcatatgacacgatcattttcagtcccagttaatggcagagccactaatttaagggttacagattctaggggcttgattcgtgtaatttcggcaaaacgacatcttgaaactgttggtggaaagttaactgatggtgctttccttccagagattggtaattcctcaatatatggaatttacaaaattttcttctaaatgtcccttttaaacttcttgaacttgatcaacaatgtgcataatttgaaatgttctgtcattttgacaagcaacatgtatttattattgagttgagcactaaaccataaattaaatgaaattagcaacaataatatagaagaaagagaatagaggtttcctagagataatctaaagaaaaccctttcatttcattgcagtggactctccaaattaaataaagaaatgataatactgaatgaagtttatattgatgttaacttctaattttgattctcaattttgatcttagggttttagtttatggtttgtctttttctgagttaggattacttggtatttaaatagaaacaggttaaatagggactagaatttttcatagaatacataaattttttaatcagtatactgttctcattggcttgtattgtcttgttaaccgaatgcttaaatccctcctcctccccctcctttgtgtcttttcactctgttctttcctttccagccattgaagatgctactgaggatattccagaggaacaagcagtttgcaggatttgtttggtggagcttggggaaggagggaatacacttaagatggaatgcagttgtaaaggtgatcttgcacttgctcaccaagaatgtgcagtaaagtggtttagtattaagggaaacaggacctgtgatgtctgcaagcaggatgtccagaacctcccagtaacactgttgaaaatttataatcctcaaactcttgctaggcaggcatcaaatgtgccacaacagtcagaaatagtttattacaggtatgtttaattacttcaccgtgttagtcatctgtgttcaattaacacttaaactgacatagaggagacttaaagtgttatctatgatatgatattagggcaaccaggctggttataaaactatataaagtagtagatcttaactattttgggttgttaagtttaaaaagcttcagcttcagtttatttgcacatatgggtaggtggcactgtggcagtaagatgtgctcttgcctcttggtattgtttggcatcctttttgttccttttaaggaaaagaaagaatataaggaaaagattacaaagaatagatttccttctttcactttaccaaagaaaataagagagctatccaatccctttttatatccgtctaagcaacccccttggaagaatcgatgtgctgaactccaataagatgccatcagaacaataatgttctacatcaagttgaatgatatttaccttgaataaccaagcatctcttctccatcctaagacccaaatgacagtgtacaagacacctgtaaaactttaccctctgctcctgccaaattttttgaattaatctcaagaaactgttcctggttatgggggaaaatccaaggcccatcaaacacactgaaaagcctactccataagctattggctgatgggctgtctaatagacatgcagttgattctgattttgaacaacatatacatctgctttttttttttttttttggataaacgaagaatcatttaataaaaaaagacatgtcaaaacctagaggataataaataaatcctgaaaaactaaaccaaaaatgaaagggaataaagagaaaaactaagaacatgatacatgtaatgtaacacattacaatctctttgtatatctacctaagatacccctcctaaaaagacataaacatcacccttcttatgtctacaaaacctatgataaatcatcagccaatcactacttttctaattgtaatgtattctatctatttcatgcataacaggatctggcaggatgtaccagtacttatcttggtcagcatgcttgcgtacttttgttttctagagcaactactggtatgtttttctttgtatctgtgctgaagtttatggtaactggctaactgctgcttacatcaagttatgattttgggcttattgcatccaattgttacagtgccatctacatgagaaacttgcctctgaaagattattttgaccaatctgtagttgttagtatgtaattctgaaaatataacctcatctactgggagtatagcgattttctcagtttacagatgaaggattttattttattttatttagggcataagaacagggaacacatacttagggcccatttgttaaaagttattttaaaaaaaatatttttttaataaaataagcagtcttatgctttttttgtgtttctctaaattgctttttcttcaaaaaataaaaatagttttctgttttttgtaagaagcaaatcctatctgtatcttaaaaaggcaaaagataacttgttttaagtttaattagtgctgaaggagtgggaaaagtgctttataatttaggcagtttgtaggtccaaatttaaacaaatggctttctttgtattttattattttgttcaatttactcattaatttattcatggaatacatttttgtacctgtgttctggggaataaagggagatactatttctttgcctatttagtactagaaggccatgtttactaatactgtttatatgagagcccttggataatgctgtatatgcttcatttattttttctagttttgttttcctttgttaacaattaactgttagttgttagtttgttagtttttgttagtgggagggatttgaacccacaacctctccctccccccttctccctttaaccaccaagccaactttataactactgttttgtatgaaatataagtgtgtctgacacaatggtttctagtttaccaggtttcagatttgggacctcgtgctcttgccatttcattaccattctcctgtgttttaggtctcctttcatctatgattgcatcaaccatgggtaagctgttttcttctctctttcttaacatttgcacttttgatttcatttttattctggattttttttattttttattatgaggtataaaagtgaactatattcatgtataattgtcaaatttatggtaagttagagagatgttagcaatatgctctttatactcttttgaagacacttccttctattggatgatattcatgtaggcttcatctcctatttaatgagtcccattttttatttactaagactcgcgtgaattttaatacgtggtacaaagtgtattggaaagtgtgttgctggaattcatcaagtaggttattatgcacttgcaagctatggttacagataaggataacggtaaaaataatcatgaagtattaaaatggaatacatgcaatggaaattgacaaatattggactaacaagtaacaatgcattgtaattgacaaatattggactaataagtaagttcttataaaatctaaatcaaatgttttggcctccattggcctggaattattttttaatgtctctcctcactagacctgcaaatgtcattccttatgtgcgcttttcctaccaccaaaagaattgagataagttacaaggtctgtacacctcatttctctatttagaattaccctcattacgactgtaattactaagcgtctaactctagtttatcaaggaagaataagcattcttgtacccccaaaaaaatgggagaataagcatttttcaagtatttcttgcttgtttatatgagtttttcattttctttttttgaatataaactatattttaagtaaaagatttttatataataattatgtatgttttgtttttaaaaaactgttttactgcttttttcataggttgaaaatagcagcttatgaaaaatgcccccccaaaaacttatactgcagaatcatttttgtaagctttaacaaactgggaggatccagaacacagaagctttccctttaacatctgacgttttgacttccatttgcttttataacgggccagggttctataataatagtttttaagctaagggagaagccaacattgttaaataattttaatttaaagagcagtaggagccttagtgacaaaaatatcaaatggaaggtagtccaattaaaaggagtggatggagacctaagaaaactttataaaggttctagctctaaatggtgctgatccatatcctcctcttcctcctccctcctccctgagttttcttctgtaaagtcctgtggaaaaaagcattgatgttgttgtcctactgtgggtggatggctacagttcaaagttctctttagttaatgcatggttgttacccctgtactggatcttgatatgtgtaattaaatgtaaatcttggactttgatttcgaaccagattatgtgtgggttttggcaaattgggggatacagttaagtcaggtgagttaaaagaaacaaagtttgtttgggttttggcaaatgtagtatacggttaagtctgctgagttcaaaggaacaatttctatcagctgcaacatctgatttggtgtgtaatatctgatttaaaacgaataaagtggtgaaacaagttgacattgtcctattgtttctgacatgagaattcatgagaacaagacccatactctgtaattttcctgttcattttaagtttagtgagttcaaagaaacaatttctatcagccgcaacatctgatttggtgtgtaatgtctgatttaaaacaaataaatggtaaaagaagttgacattatcctaatgattctgacacgagaattgattagaacaaggcccatactctgtaatttacctgttcattagatcctctggagttgctataatcctatgctgtagactacatgatactggattattagtttctgattaacatgagtgatgttgttgtggtggcagtgagcaggagtttcgtatgggcttatgcttgcttccagtttgcaactcttatcctgttagctcatgtattttatactattgtaagatgatatagttcctatcctgacttcatgaagatacttggcactcggtgagagcaaaaatatatattttgacatttacctttttttcaattttgtagctcaattttaatgcaattctctccattctcctttcctcgttcactggatttgggattgccatcagtatgaattctctcgttatggaattcatcggatggagaactagcaggcaggttcaatcctcctttgaaaatgttaactggacagagcagcagcatcgtgagcatgtacaagaacaggtacaggaagatggaggacatcatcagcgacaaagacaacaagagaatcatctgccgcagcatggcaacagttgatgcgactgattcagggcagtcttcctcggttatgaagacttttgttctttttctttctttttttactaactttttacactaaaaacatgaggatttccacttgaaggtgtgaatcatgatatttgttaacatagttaaacgttacttttgtatgttatgctctttcctttcactgacaagcaatcccatcgactaattcaaccccattaatgaaaacaccctcaagttactaccggcgatttgttagagtgcatgaataaaaaggaaaagttgttacagtttaaggtgtcctagatagagtgcatgaatttcagttagccagttgcggtttaaatttataaaattgggaaatggaagggcaaaactatgagaaattgattccacatgcacgtagctatgacaaaaccatgcaatgtaatgcgaaggagagcccctaaataccctttccaaaagcaaaggagattaagaactgctagccattaatgtcccgcaatacatggaattatacaaacacaaatctgtggaagagatgaaaagaataattttcatctatgccaccatccttttaatggagggagtccttcttagcttctaaatcttacagatgcaggggagttgccggaaatatatataccgtagttcacttttagaataaggacaatggaaaaaccaatttagggaaatttagtcgcaatatctttaattcttattcaaagtgccaaactgcagttgaattatctaattacaagcacaaaaaatatgttgcagttccaacttaaccatttcttacaaagaaaataaccacatctcaacctttcagaggacaattcacttttgatatggcaaaatggtggataattggtgaagacaaaatcttgttagggcaaaggtttcacctagaactgcacaaagtcgagtaatgaaatgaagaaaagtgccttgctcttctttgattgtggaagtgataggtgacggatcatacaaaaagaagacagctgcagacatcaaacaaacaggaaatgataatcaaaacctatactcaaagaatatagccaactttaaacactagtataaaaccgacctagccagcttcgatcaaactcatttatgggccaaaaatattctgtaagtgagaagttggtatggagagtgagtattattaaagaaaataaaaaaataacgttttaattacataattactttaagaacaataataatttaacatatattatgaaaaaacttaaaagacgtgtcattaattgaaggaaacacatgattaactgaaaaagaataatggtataaaagttattttgtgtagaattaaattgtttttttggaacatatgtgaagatttaaatttattttatagaagtaggataatgctcttttaaattgcaatgcaagaaaacacgagtgaagtccaaattaaagcacagactatgatctaatgcttgatgacattagaaagaaaaaaatcccgtttttgaatgtactggtcctcttattaagcaagagggagggaaaacagttcagcatagcagggtgagctcatcagaggtataaatatatgttgcctcttttgatcaataagttgtgatgttggcctcttaagattagttcagaatctctgtcaaaaaaagattagttcagaatcaggggtcggcctctaggaaatggctttaactgaaaagacaaaatgcttaaaccatgtgcttgctttgaagattatgaagtaggccaaccaggtttggaattggaggtaagtatgaaaaggtgtgaacaccatttccaccagtgagtgttagttaggaatttatcatcgataaaggattacacttggggtgaatgcattctgcatgtacggatgtgcctgtgcctgtgcctttgcacagttgtatgtgattgatgctctttttaatcacttatggaacttgcgaaaaaaaaatttgcactggataatgtagtatccgcgtccatctcagagggattgggtgtttggtcctcatcttttactctttactcttccttcttcattttttcattttattttttaccattcatttttttattactatttacccttttctacttgtttttttacataattacatgaaaatgtcaacattcttttcaaaataaatcactttacagtcgtcaattggttaaaattcactttgctacatattcttatgtcccattggctcaaaacaatcttggcatattaggcctatgaactgaagcgcatgatttcttagatatatcttgctctttctgggtagaacaaccacacacgtcttcttaaaattaaaaaataaaaacatctcacacgtggcatgtgacacatgagaacaatctaagtgtgtagtactctttgatccggttagattttaagaaattaggtttctagttcaaatttatacaacttttcttattatacgagaaacgtgagatagataatgtgataaaaagaatttggaggaaaagagttgtaaaagatattgtagaaaaaagaaatataaatattataactctcagattgccttttttttttttttttttttaattttacgttgaaggctaattttgaaaaaatcagttaagaagttagttgaaagacgatcacagtcaatttgctggtcaattttcatcttgctgatgcaatagtcaatttttcaacaaataattggaagttttgtgcggaaaaactaattaaggaccctattagtgttgatggaattattaaatatatgcccgaaataattgaaataatatttaacatatttaattaaggtctcatcgaatagcttataataatccgtgctgatatgaaatagtacatagaagttactagtggaaaatgaccaacagagagatagataggcagctgattgaaagggtgttatatatataaattcatgtctttttgaaatgaattctatcacgtgaaagaaattagagagagcacgtagtataagagatgcataatgcaataagagtggttacacagagaaagtaaaaccaactaaagtcgaccaagtgaccaaatatccaatttgggtaattttgtactttagaagagcaaacaatgatagctgtcaacttaagaaggcacatgaaatacagattgagttagtaattgcattgaatgccgcgggtacgcaactgataagagctatagcttgctataaccataatgaatagttttgggcatgtgtaactcatttcccacatccccaaacatattttttcatctgtgtttgtatataacacccttcccgtaatcaactccctgtgttttttaattgagttctccaatattttcaaattaattgccatatcttttgttacccattacaaaatagttccatttttcatttttcaaattaatacatgaagagaaactgctatttggatcttcgtcttccgtcttcatcaccttcccatcgttcaatgcaagcaatctggactctttcttttcaatatttacgttatgactcccttcatttgtatatctcaggaattaagcaagtggaattcttcttacgttatttgctaattctccctccttttctgcaaaatttttgcaggaatgggacgttgaacatccacaataaacttgtagctattcttcataatggacgacgccaatgcatttttgacacagcagaacttcaggtatacgttatagtatcttccaatcttctatctttccattttaactcctttttaaaccatttttttttattgcattccaagaactgcagactcggtgaatgtttcctttaacttattttaaatgaataattacttattcttattaaaaactaagtaattatttattcaattttaagcgttaacaaacaagactgtacttgatagcataataaaattttgcatcattattctcttcatgcaattttatttatcttttaaaaggttattttataagatctaatcaaattattaaataaattcgattataagtataaaaaaatgtttatttcactatattgtttttattgaaataattaaaataatatatcttctataatttattactaaaaaagtaacggatgaattagttaatgaatgtaaattttttaattaagcaattcataaaactgaaataaggattaatagatataatgcctttttcttggtaaaaaaaatataactgtttttaattgtaatcttgtatcccttgaacattagttaagaatttaaaattattttttattttttattaaattttcctaattaaaaaataagtttatttaactgagttgtcctttcttgaaatactttatttccccttattgataccggtaaatttagagagagaaaataatacgtcaattttgaaggtatgaaagaatttcttgaaacattaaatagatgaaataaaagaagggattatgccttatctttttctccaaaactggaaatcagcatttagctcacaaaatgggagaagcaagcttgtgaatttaaaagaaattaataagataaaataattacacaattttgatggaaggaaataattattaaaattagatgggtcaaattaaattaacgcttataaaactaaataactaatagaaaatagattatgcattgatagtgtaaaatacaatcatctaattataattaatcatatatgataagtttgtttatatgataagtttgttgaattttataaaattatctaaaagattatatcaacgatggtaattttttgtgattagatggtctcacatcaccattaaactcatgatttaatactataaaaatatatatatgcaggcaagaatgataatatggttagcaagtcaagaaatggaggaaagcactaccggcttgcattctgaagcactattgatacatgtctcgccaggcctttccataaagaaatcaattcaaaatttcctccaggggagaaggaagaaaaggtctcaaagccacatctcccttgtaactcaaaatgacaaaaatatgaattaattaaatcctcattcatctatatctgcttgagtatggacctgtttgggtgtaaacttatctagaaatatttctagaaaaagaaaataagaagaaaaaaataaaatgaacttctccataagataaaatgagttttccattagttaatttgtatatgtcatcttatcttttaaagaaattatattgatgagtttctaaaaattagctaatggaagacttatttttatttatgaaaaattcatctaatttttttttagaagtattttttaaagaaacttatcaaaagatcttatatagaatactgtctgcaggtggtatggtgcatttcttgaatgaagaagggctgatctgtgaagacagctttgttaattgttggttattatgtatttctaattcattaaactccagcccaatacacgaatgagtatattagtagttttggtataacatgcataatatggatttgcaaatgctgaagactttaatgaagcggttataatatatgtatttgttatatgacatgaatgtgccaataagtcaaaccaccaagcacgccacgtcctctccctctgcagccaggttctggagcagagccaccctctttatcatctcattctcatcactaaattatttataatcgtataactaaactaaatgattaaatataaattaataattgtatgattaaaattaattagacatgtttcctccgtcagtatatggagttacggagttgacgcgatgaatttgaaggtgcatgtccttttcttgctagaacagctctttcttagtccttttgcaacgagctttattttaatttagaataattttatactatttcatggcattattttactgttttatttacgataagtattaagtttattttattttattagatataaaatactttacttttttatttagtggtttctttattaaataataggagaaattgtaggaaaatcagtaaaaagatataacactactcattaatttattttacttcacagttcaagttcaaaaaaatgtatgaatctcttcgtctatcccattttattgtgaaaatttgagtaatagaaaggagagatattggtaaaaaaaaaaaaggagataaacaaatgataaataatgtaataagaaaaaaaaaagaaataaagaaagaagaattttttaaatatttttattataatctcaactgtttaattataattaattattataaataattaacatttcattttcttctaaaaaaatatctcattttctaaagtacatgcacctttttaatcttcatatttgatggatatgtatgtaaagggatttaatactatcatctaatcatgaatcatcatatatattatatactaataattatttttgattgattaacaataaaaagaaaattttaacattaaaaaatacctattaattaaactcaacctttttatgagtgtcaaatttatgagttgtcataaattttcaaaatatgaagtgttgtgtttcttcatgaaaactgaattatttcatattgaagattgtattgtttcattgaaaatacaaatctattcgtaaagaataatttaaaaataaaagtgagttttcatatacgatatcaagtaaaaaagatgtgatttttcattaaatgaaaattacttcaaaaattataatttttttaaaatatacatcatttcatttgagaggtgtcacttttctttcaaaaagacgccacttgaaaaatatataattttcataaaaggttcaattcaacttttaatcccaaaatatatatagcaattgtatgattctttcatgttccaattgtactaaaattcatttgtcttacctttggttaatctcatagaaaacttacaccaaaaatagtataggtattactagcataataatattcacaattgaatttaagaaaacatgagtttcaggcaattttgtcaaaaaaaaaaaatacttaaaaaataatcagcataacaaatattttgttctttaataaaatcaaattattttgtttttaattagaattttctttttatcatatttttgtattatatatatatatatatatatgtattatcagtaaaatattaatttttaattgttagtttttattatcgagaggaatcgaatccacaatctatttgttcctctctacatcttttatcactaagttaaccttttatatatatatccaataaaaaaaattataattcaaaaaaaaatgaaaacaaaattatcattttgtaaacatcattattatctgccttgagttttgaaaaggcaaaaaaactcaagtgttttcattgtatcatgaagaaattttgtggtcaaaccctagttgcattcaagtcttgacattggtgagggaaattaaattgtgcacatattccttttactacttcatcttcccctacttttcatagatctgattcatctgatgtcaacattttttgtgtctgacatgctaatatgtccaaggtggactgttgattatggactagccactcctccgctgatcaattaatatccaaaatctgtttagtttgcctgatgctctgatgagactaaaccattaaaaatgggtgaatatatacttgtacaaagaacactttgacacaatgatactcgagttagtatgaattttaccaaggtaatgatatatattaaatgtattcaattaccacttttcctgatacattaacattaattgctagtatttatagaagttaagttgggttggattctctatcggattagaaattcaaagcctcttaaaggtaagactctctatcttgaaataacttttctttatattgaagtgtaatctatttatttacgaatttatcgtaaacacatgcatctaaaattttagggtgaaatattctaaaatgagatgactctgtgtgcgcttaacagaggctaacacacacttaattgcgtgggtcctccttaattagacagtggctgcggactgcggaggcactccttctgtggctcctgccacgtcacatccctgctctccgcctcctcttttgaagtctccaccccaaccctaatagagcactttggcatactctctcactttacgcccttttggttcaacaatatttagcatgcatgttaagtgcaagtcttttttttttttatatatacaaaataataatacgtggctcaaaaattgctaattaacttggtaattttgttctaacatgccttaaaaaaaccccaaattattttataatatgttttggaagagccttttttaatatatagtaaaaaagtttttaaaaatgtctctatttggtctatcatccctttcttaagaatggtttactttgtataacaatgttaatgataaagtggagagtgaatataaattgattaatttggtattttggtcatcataaaaggagaagtaatcgagtaaatagttgttaactttgtgtatgttttgccaaatacttttagtaaatttttaaccttttttttaattatttgaaaattttgtctaaatttattaacaatgttttataaacaaacttattttaatagtttataacattttttatactttacttcaaataacgttttttaaaatactaacttctaatttttatattttatttatatttttatccataaaatatttattaaatttctttattatctttttttaggtaagacataattttattagtttttggtttctcttatactatttatttaaaccattactaaaaaaaaccattaaactaattacatgatttattgtatgattttaacactatatttcgaaatattttaactagtccactaattaacataatgaaaatatggcatctacttaagagtatgttattttattttattttatacttggtttggaacattttaagataaaatctaagattaataataaaatacataatgaaattatgtataataattaaaactaaaaaattataattagaataattaatctataaataaaaattgcaaaactttaaaatcaattaaaaaataaaattataattatcctaaaatatatttgatcaataaattaaaattaaactttgtataaaaatatcatataaacatgtttgttattatcattttatatttataaattatttgaacaattaattttaccaattgttgatctagaatgtaagtgttttgtttaattgttttaagtttaaaatcctcaagtaatgtgcatataagtcttccgttccaaaataaatatcgtatttgaaaagaaaaaaatcaaaataagtgttgcatttatcttttcaatatgatattaattatttttttattgataatcctaataaatatcactttagttttgcaatgcaatattaacattaaggttaattttgtaaaattactattatctttcatttatttattaatttttcttgatttacaaaaaaaaaaaaaacctaaaatgacacttattttagaaataagaaagtaattttttttgaacaatatagatataaaatttaagatacattatttgatgatactacaatgacgtcgcattaaatcaaaagtaaataatgtacccaaaaatcaatgtaccaaaaaattctaataaaaaacattaatatttacgttgagtctattggtttggagcaacttcatcaaccaaaaaaaaagaatggaaaccaaattcatcaaccaaaaaacaaaccaattccttcttgatgaacttggtttccctctctccgcctaatctaatttattttgattagttcatttttctcttccttaaaactgaatcaaccaatctgtaaacactcggaacttagatgaggttatatccttgttggcatgtacccactttaggaaaagtaatgagaattgacatttgtttaaaaacctacatggcaaaatcaattgatataatctgaaaccattaaaacagtttttttcctgtatagataagttatttaatatgaaagataatcttactcgacctaaatagaattatgaacaacaaaatttcacttctaactctaaatatttaacacaattaaatattcaaaatgtgaatttaataccattgattaatctagaacaattctatgttagttaatggtaaaacattttccctttgaactggtttacctttatggaatattagaaaatggggtctaagtgtttatgataaaggatatactaagttaattaagacagcatctaaaattctcaacttatactactatttcaaacccataaaattttctaacgtttatgttatctttgtacaatagacgctagacgaagcacgagtaactttgaaagtaggagtagcttttggtatgatataggctaaagtaacggaagctgtcctaaactaaaaggatccaagggaatatcaaaccaaaccccaaaggtaatgagagaaacaaaaatttataatttacatttctataaactggacaaaagtattttaaatatctctaaagatcaaaatagagcgctggattaaaaatcgtgcatgctgcctactgctatggccgatgggcatgggccggtactttgtattcaggattttaccaatcattgaaaaataaaccgaattatgcaggcatcacataatgtcatgaacaccatggccttgaccagtgaagagttagaataacctcaataaacacctgtttgacagtaagtaacccagtaggcatcaaccaatcaatttcattaacaatggaaaaattaccggtattccttcccaatttagagtgcacaagcacagttttcaagttgtaaccgattcctataagatggtgaaataaaaatgcatgtgccatctactccaccacttttgtatttctctgacacattttaaactcattcaaacgttagttttgcttcccagctcaacctttatacagaacttgacaccctcaaattagcccactgcataaaactatgatcctcttgctcctctttgcctcttctcttccaatgcagctgcctcatttaacatatcagccgcatccttgtgcatgtccagttttgcaagagcaactgattgcatgtagaaagccgtgggccagtctggataaacgcactgtgcttgcattgcatctcgtagtgcaggatctggttgatcacataacagatagcatagactgcgccttgcaaacacagttggggagaccatcgttccaacatcaataaactgcatgaataacaatgcagaagcatctcaaaataattagcgtgcacatagcaaagctacaataatttacaatgtcaaacaagtgcagaattgcacctgggaatagttatcaatggctgtcctaaagtccttgtcacggaatgcatagtctccacgcttccttgcttccagcatatctctcatctgttgagtccactcttgaaacgacaactgaaccaatccaaattcaaaccttatggcacatcatccaattaaaaatagaaaatttaaaaccaatgcacccatcagttacctcattagttccttcatcgtccctgtagtgtgtcgcaaccaagatctgatgtattgcagttaggtccattcttgaacaagcctcacccattgctgaaagaggacgttgtggggttgatggagcttcctcatgctttggaattccaagcatgatatgagaacgaacctgaagcacataataatagtcaactagaattgtttctgctttaatcccatttatatgtctaaattgccatttaacaaggataatttccatatcaagtgacagaagatgttggaattgctatagctcaatatatatctttaatcccttctctagttttctacactgagaaatacatgataagacaaggaagacaataaaaatacttgcatgcatgacaaattgaaaaaagtatacaaaaagcatggaagaactttctttagtcacgttcagccttgcatagatagaactagtttggcttgtgccctatttttatcatactgcttaaaagattcttgtaagatatgcatgaatgcaaagttaaaatttatagatagataactaaattttatccgatggctatataaagttcaaaaccttcaatgtacatgcatgaaaatcatatcatatagtttaagatttttcaaactgcaagtaaatgcaaacttaaaagtaacaccgggctcagccctaaagtcattcaaccaggtgtatgaccaaaagctcaaaatttgaaatcatgcgagtctaacaattgggttatccttatccaactgaatgtctttatataatgcataaatgcaatacaattaagagtctacataaatagttttatattcacaaattaaaatgcttacatagagggcgagccttgaacaactataacattgttgtcttactttgaagtcacattcaaatccaagaaataacctctctccactcacaggggtaaggcagcctgatacatctaccctccctaaactccattaggttggagccttgtgtactagattgtcctacatttaaaatgcttgaaaaatatgaattaaaatttgtttattgttggaaaaccgccttaattgcaattacccttagcttgccttaattgcagcctcttcagagtctccttaattgtagatgtgaaagggtgtgtttagtcccacatcacctagaaatatagcttctaaatagaggttataaagtttgagcaatactcaccttacaaggcgattttgtggggttgacctagacccaaattctaatcaagtatcaaagtctaacctagatttgttattgggccacccatatttctctatgctctagatgttatccctggtcgtgagggagtgttcttattctaagatgttaataatttatccttgattcattgtcgagccacctgccttgtcatgctttaggccaccatgagcatgaggatttgggggttgccttaatagcaacctggaggaggtgtgtttagtttcacatcacctagagaagtgacttataaagcttaagcaattcacaccagttttgtggagttgagttaggccttgagcctaaattctaaaatgacattaaagtccatcaaagattcgttattaggccacccatgtttctttatggtctagatgtatgttcttaggcatgaagagatgttgttattgggacatgcgagtgaggggagagttaagatcctacatcaactagagaatagccaatgtagtactcttaagcttgggcagtcctcaccttacaagatgttttcttctttttttgaaaatcttacaagctggtttttaaaagtcaattttgtagaattgagttaaaccttaagcccaaattctaagatggtgtcaaagcttatcttaaattcatttttggttaattgcagtctcaaggggtgtgtttggtccaacattacctagagatatggattaatagagcttatatggcatcaacaatcctcaccttacaagttggttttgtggggttgagttagaccctaatcctaaattttaagatgatcttaaaacatgtcctagatcatttattaggccatttttgtttgtctatgttctagatttctattcccaggggtgaggcggtgttgtcattggatcatgggcgcaaggagtgtgttaagatttcacattgactggagataaggtcaatgtagtccttacaaggcctgaacagtcgtcaacttacaagatggttttttaaagtcaattttgtaggttgagttagttcctaagcttaaattctaagatctcacatcaactagaaatacggccaatgttatccttataaggcttggacaatcctcaacttagaagctggttttttaaaagccggttttgtggggttaagttagaccctaaatcctaagaactagctatagataaaaagtcttgactatgctctttataagcttaaataaagcttataaagcttgagcaatctcactttacaggccatttttgtggggttgagttaggccctaagcctaaattttaagatggtattagagctaaacctaaatccattattgggtcattcgtatttgtctacattctagatgcctattcctaggcatgaagggccgttactgggtcatgggcgcattaagatcccacattgacttgagatataaccaatgtagttcttataaggcatggacaatcgtcaccttacaaattgaatttttaaagtcagctttgtggaattgagatagaccctaagcccaaattcaatgatcccaaaaatctatcctagattcgtggttgggcctcccacattaccatgttccgagcctatatagccttgagagagaagaagaggaggagggggggggggggggggggggttaagaaagccttcttaattgcaacctcctggggagttggctaaactacagcctcaatggagtgtgtttagcccaacatcacctagagatacgacttaaatagagcatataaagcttgagcaatccgcaccttataagtcaatttgtaggattgagttacactctaagcctaacccaaattttaatgtgatatcaaagcttatcctagatcctttattgagccacccgtatttgtctatgctctagatggttattcctaggcatgagagggtattgttattgggttgtgaggcaaaaggtgttaaaatctaacatcaatttggtttttttcaagctaattttatagggtagagtcgggctctaagcccaaattccaagatggtagcaaagcctatccaaaattcattgttgggccacccaattgcaacatctaggcccataaccttaggtgtgagagggtgtgctggaaagtcaccttaattgctgtcactcctattaatgtggcctttttgacctgccttagagatgtgacttaactagaacttcaaaaggcagtcctcactttacaagctgattttatggggttgagttagaccataaatctaaattctaatatggtatcaaggtcaatcctacatccgttattgggtcaccagtatttgtctatgctctagatgtctattcctaggcatgaaggtgtgttaagatctcacatcaactaaatatatgaccaatgtagtctttcgaaggctttggcaatcctcaacttagaagccactttaataccaattttgtgggggctgaattatgccctaagctcaaattctaagaactggctatagattttaaaaataaaataaaataagtcttgactaagctctttgagatagatgtacacaaagaacagattccttgaaggtcatatgcctatatttctagacaatatcacatcatgaaaattactaaaatttcttctatcctttacaagtaataaactaacagtagtacacacaagatttattttggggtgaatgaagtttattaatgtaactctgaaacaaggaccaaaccagcaaagatgactaattctttgctaactagaattcacaagtcagctagaaccataaaccaattactttggctgtttgagaacttgacatatcaaacatcttttaaccttacttatacagaaaacccttataatattatatcatctcaagcaagtggaaaagtttacggactaaagaaaccctagagtcaaaatgaacttttgcaaataacccaggttcaactaaattttctccaaagacaatttaaaatgttccagcctaatatttgaattaccatgttttatgtaagttgaggatggtgagctaagcgaccccaaccatgtagattccattttgaaatgagtgaccaaagaaacaaatatgaaatataaaaagtcatagaattttaatattagacattaacatccaacataaatttttgtgtaggtgataatggaatatttgatagggctgttgaaacaacaaagttccagtaaatcatatgttccattattaagttagagaaggggtctgtacttcgggttttgtatgcaacggggcaagtgttgtgaccaaatcctttgtatcaggccgctcccttggttcatattgcaaacatttagaggcaagattaacaactaccgttgcctcttctgttgaaaacttcccctctaaatgtgaatccattaagagcatattgtttttcccctgtatcatatcaagtgcctgcaaacacaatcagataactccatatggcaccaaccaagaagaaaactaattgaacacgtgagcatatggaaaatgaattgacgttaaatttaaataaataactatcatagcatcatcaacttccattattaagtatttaagtatttaatcaaagagaaaggtttccataccttaagttgtcattcgtataagatcatgtttcatttattgaacaataacgtaatatcatttgaggtacagtcacaacttcaatgcgacaaaataaatagtgtcataacaagcacttattaacacaataatagtcaagatggaaaaacactgaaagtgagaattgcatgttaagattaaaatagcttgattaaaaacatagaggtatttacagcttttagtgatatgtggaatcagaagagaggggcaggtaaaggatagaaggcagttacatgactgggagggatgtgcttgccactgaggaggtctagaagaacggttccaaagctgtaaatgacactttcaggcgtgacccttcctgtaacaaaagaaatatgattgagagaagtattgttatacataaaaaagtaaaaaagaaaatgtgaagaagggagttagttaccgtttcttaaatattcaggaggtgtgtaagcaagattggtgctataactcttgccatccctgctgttcttcataaaaccaaagcaagagagacggggatcaccttgctggtcgaagagaacacggtaagcattcaagtcatggtacaagggccgcccctcagaactgcaataatgcaaagcctgtgcgatgtacagagccactcgcaaacgcatggcccactcaatagtctgagtttcccctgaatcaatgaaccaatgaatgaatgaacagatgagataaacactagtacagataacaaacagataagttacacatacagtggaagagatgcttggcaagagtatcattaggcatgtactcggcaacgagaagcctctcatcgccgtcgcagcagtaaccgatcaaattagcgagccgtggatggcgcaagttgccgacgccggaagcctcttcgacgaattgcttgggatccggccaagcagccttgctgaacttcttcacagcaatccaacggctctggttctggaggcgacccttgtacaccaggttgggtgccttctccccactctctgacacgatatactcggagctgaaattgttggtggccgccttcagctccgccagcgagaactccgagaacgagaaatccaccccctctctctcgccctcagactgcctctggtgggttccgtacgcttgctctttttccttttccctctccttctccttctccttctcctgatcagggtgagtctccctctctcccactctcagcaacatcgatgattggcaacaacccatcctctctctctctctcttcaacaattatcaccgatcatgaatgagatctccacagactctatactcttctactcttgtgttcgcgtgatttgcctttttggcaatttttttagtttccttgtttctatgctatgcttcacttcccttcccttccttcaccctcactgttgctaattactaatcactgtttacttattacaatccagcactcattaatattctattaaatctatttccaacttcttcatatgctcttcctcaatattacctttttatccatactttctttaactacaaccctatcttacttattctgcttctcttcagtcttcacctacccaaatcaatgcttcccattcttgttactattttaccttcttttttatttttatatattcaccactttttttgttacggaaaagtaaaatcttccctgacttcctacctggtttttccgacacattacaaatatcttccaactctagctagctccaccaatgataccttgccgactaatatatctcaacctagacacgtcaagtcaagataaacatcatatgggttcaatttatatcacacaaagttatttttgttttctttgttttgcttaatcttttcattttaatttggcttttctgttttaaaaattgtatgattttaaaaattaattttaattaaattcttaattttatctatcttttatttattttattttgatttaattaaatcttaaatttaacatatttgtttaaaatatcattaaaaataatttaattaattataatgtaagaaataaaatacaaataaaattaaagatgagattaaaattgcatatttctaaaaaatatgaggataaaattataaatttttaaaataaaatgatcaaatatttttattttaaaataaataatcaaaattgtgaattgaataaaatagaaaaatcaaaattacatttaaatctaatttttatctaataaattttatatattaaaataacttattgttgttttggtacatttttatctaataaatcatatgtgttgaaatattaaaaggcttggtttgttatggctgaaagttgttctttctagtataaatctgattccttaccttttcacttgcctaaagttgagaatctgaaaccaaaaaagaataatctgattggagggaagcttctgcgcagatccgtttaattaagttctcaatgctgcattttaagacttgtctctccctttcgtgaaatgttttctccattaccattgatcacgtgccgggatgcatattctaatcaagtcaaagtttttccttttcctttttaaggtgagagttcgtgctgcataacataggtatgaaataagaagtgaccgccaaacataattataatatataattttggttaattccccccccccaatatatcattcgatatgttgctttcttttttcatattcaattcggtcatctaatttttaaaattgatttgatttagtaatctaattttgtttttgttcagtttaattttctaattcgtaaaattagtttaattcgatcatgttgtttaaattaacttgagtgattctttcatttaaatttgatcttagtgtctaaatatatattttatgacggtgtaaaattatcattaaatgattttgagcagttacaatgtaattttttaataccgttgactcaatttagacacagtagaatcaaaataaatcaattttaaaaagaacaaattaaatctcaaaaaattaaaaaatcaaatcaaacttaaaaaatcaattagaaaaccaacaaactaatttaacttatgattttatttgccctactcatttctaatgtttatcatacaacatggaatcctacaaatcgagtttttttttttcaaaagagaacatttttttctttattaccatttgggagtcgattttcaataattatccaaaaaagtattattttttaaaatttatgactttaaaatcgtatcaatttttttttacttttttgaattgaagtcgtaatattatttattattttcaattcataatttttaaaaaatggtaatatttgaaaaaaaattacaacttgaaagttgtaaaaaacattatcactttcaagtcatagttcttaaaaaaaattgaagtagtaaataatattacaacttcaattttttaaatattaatacgactttaaaatcgtaaattttaaaaaataattaaactaaagtgtaaactcatttatgacttctactaaaaaattaaaatttgtaacatctattacgatttatccccttttagataattatttaaaattgaccctccaaatggtaataaagaaaaaaaaatgttcccttttaggaaaaaagcctacaatggatgacacattttcttacattttacaccaactttcgtacgtttacttggagtgttgttaatacaacaatttccattaaacattagtcaaaattatatttatacaatacatttatatcatataattaaaaaagaaaaataaaattataaaatatatttcataaataatgtaacgtatgcatgttataatcaattattacatatgataagcagttaacaatgtctgctagccaaaatttccctattcaaattcaataataaccaataacatctttgtgcagcttttgttaaatgacaatgtaccacgcaacgcaagaatcacatttcaatttcgtaacaagggctgaaaaggacaacaataaaataaaaatcttgcacgtaagcagtaagcccccctccttgtacggatatatgaaaaaaaataatgcaattaagtaatacaattttacagacaaaatattattaccgtatgtcaataattgaagtaaaaaacatcatatgggaataattcagttccgtagggtggcacaaagattagcagcactgacaatccaatccctcgaaaacacctctgcaccttcttattataggcgaacaaaatgcaaagttcattaacacctcacaatagcaagcgccaaaaagttggattataaatggaaaatgatgagagatgagagtacaccatatgatatttgacagagagacaaaaaaggatcaaaaacattataagtactatagatgatataatataatagaatgaaaaatagaagaaaaaaatatataaatgttaatagagttaatgtgcaaggtggagtgatttgcaaaggattccatgttgtgtaataaacttttctcttttcatttgcacattaatcttataggtcaaacttaagtttctaaattgattttggagatattaattaaacataatttcaaaatcattttacttttaaggttaaaatatatttgtaaacctaataaatacctgaattttgtatttgttttttgataactttttttcttcattaaatctctaataagataatcattttatttttgattcttaacactttttttagtcatgataaattagtaaattttgtatttgttcatttgctaatttatcataaactaaaaaaagtgtcaaggataaaaataaaattattattttatctgaaagtaaaaatgaagaaaaaatttattaaggagtaaacaaaaaatttagatatttattagagatcacaaatatattttagcttacttttaaacatatttttggaccctcccaccaaaaattctaatataccctaaatgcatgtttggtttgtagttgaaattgttgtgttatacatttcaatgtaggtccaaaggataaaaataaaatgaaagaaaacgtaaagatcttgatccttttgtaaaagtatttttccctcaaaaataattttttagctgattttcaacatgctctaaataaattacttcaacatgacttatttttttagctgattttcaaccatgctctaataaataactagattataagtgaatattataattatgaccacaattagttataatttgatataacttgttattgtttttaaaatatagatatataacagattatgaataaactaattgcataatcaactatttaacaagttatatttaaaatcaattacataaccggttgaatgaataaaaataagttatttaaaataatcatttctataaaactagttatagttttatagatttataattataactattttttcaataaaaataaccgtaactataaaattagttataactacttgtatgattatttttttaaaactggttattttgagcagccttggtgaagaggttggttcactttgagagctcttggagtctggtttggccagcccgttccaatctccgttgtctatcttatcatgaacaatagttggtcacggaagagcccaccaccacttatgtcagatttaagttgctttgcatttaataacggagttctgttttcattctttgaacagttctcagcaatttattccagttgaggaacaaatggctataagaaatattttattctaaatgctttttcatcaagcctgctcagtgttaataggtaatctgtacaataatttaacttaaaaacgaatgtttttatacaggaaccaataacacccatgcattcagtgacgtgcgttactccactccgttgcgaacgagacttgttccaattttactgcttcaatttgagcaatgaacaccttctagcacacgacttgccagttgcaggggttctatacctgaaagtccgtccttctccttcatttctattttctaatgcagaaagaagaaccatttagatgttataatttgtgggctcccctgtcttttagcagcacaactccacttgtagccttatagcactgaatacccaaaaagcaaccgtgcgcctcatacctcacacttatcttttcgtttgacaataaattccactgtcccatcccagcagtatcttcagctccaatgcagttagcttagcgtagtgagaaatcaaacccaacccctcctcccaagactctgttgtaaagaatagttagtagagggagatcagctagtttctattctcggtaaatggcaaagataatatgattccaacttccatcagctacaccaccctatgaaactctctcatgattttgggcagcactttcttcttcgctccgttgtagcaactcctcataagctctcacagattcgtcagtaaatctctccatggcctcaaaaatgcactgcaagctagcctgtagactactgcttttgtcactctgatatatgatattctcagaaactgaaagacctttaccttctccagataccagaaccacctttcgctctaatgcttgaatttgcttctgcagcttctggtcatctctatccatatttctcacttttctctcaagatccttgttcttcatcacctgcctatgcatttctagcttatcttgttcccatatctgaagcacactcatggtaaatacatgcatggaatcaacaacttccttttcagatattctatccaaagcttgggaccactgattacatattacaaatatttgcggagccccaatcctaccaggggaaaatgggactatgccgtctggtgtttcttcaggttcatacaggagacatttcagcagccaattattcaatgctctaacataacctttttgggcacttatccagccagagaattggaatgtccaattgataagctcttgttcgagctgcttggttgcctggagatgactatcaccgctcttcttcctggatccaatggaacccagtattctggcttctctaattgcttcacactgatcatgatgacattcaagcatggatttccacattctggtcaacctgaaaataagcttatctcatattataccatatatacatcgagacacccaaacaattctcaggtgataattacattacaatgagaaaaggcaaaacatttatccaatactatgtatgaatggatatctcacatgcatgtcttatcccaaaggacagagaaaaaaattagcaacttcaaaagaaaatgagaacattaattcaaccatacaaacttaagaagaataaaaaagcgcatgggtgacaacatcacagcatgtctggaacggaaaactggatggagaatactgaattcaagtgctcaatccacttgcacaaggataaacaggatatattttaaggtttttagttcctcttgtagattggagagtaataatttcttggaaaagctcttgcgtggttgcatcatctcccctgtaaaggatgattattcctctggctgacaactcgagcacaacattatccacaaattggacagataaaccaccaaattgatcatatggttggaagttataaacatacatcagagtaaatagcaggatttatcaaaattatcagaaatggtcttagaagatggccaagtatttgcttctttctatcagcactatgtgtagattgcaggtggatttgttggatttcgtcaggatatatacatttcaccatggttatcaaagaattctgggaaattgtgcatcaatatttcagttcatttcatagggttgaaatatagaggagatgattcctatggaatggaatctcaataacaaaataaccccttccattcaatctttgtctaatgttgtagagcacataattagttcagttactggaagccaatacaaacagctaaaagtggaaagtgccactgaacaggcagaaaatgcttgactgactcgttataagatgatctacacattttgcatgaggtcattctatctcacctcaatgataatagacaagcacctaaaatagaagcacatcaaatcaaattttgtgtagaaaacacatgaccctaaacctttttcacatatttatgatccattgggaatataatgaaaaaatccaatccattcctgatccatttaattaaaaccatccaacccatcaattaataaaaaaaattagggacgtatatccaacccacccatttaaaagtatgttatattttatggatcacatggtgatggaaaggaagaagaaattggctttcaatactaataggaagaaacaccacttgttccatttttaatggatttttttttggggggggggggggggggggtgggggggatggaaggattggattggattggagcatagatatgggattatttgccatccctacatacagagttgcccatcatgaacagagagacatttaggacttgaacaaataacaaaaatggttagtttttaacatcacatacccctggattaattccttcagctgtggccacagttcttcatcccttatcttatttatagtcatagaaatcttatcaaccacctgaattgccattctaatttttgtggacagattcctaatcaaagttcgagttgaatcaactttatgaaaatcagaacccctatcatccaaacgcttcaacctgcgacacttcctatcgtgcatgacccgcatcttttcctctgcctgcaaacaaatgaacgtgcgaaaaaaatgttggaaaatattttcctataatttaaaatttaaaataaataattttctttttctcaatcagttttttctaaagataaaaactattctctatctatttattcctatcttttagaaattgtgtttgactaagtttttagtctttttatctgttggaggcgttttgcacgttattgagatttgtagttatgtttgttactggtttgttagttgtgatacttgggctgcacatttggtggttattttccccccttatatatagcttcctcttatggaaaaataaggagaacgtataggcacacacctacagcaaaataccatttgcctatttctcctttttataaaattacattatattactacaactatatgttttggagcatggtgttctttggttcgggatcctttcgccatactcgattggattaatgggttgtcgtatcttgggagaggagcgcatgcatattaatttattgtaccagtgtagtgggggaatttttctctataaggatagcgcatagtgcacttcaatctaggctcttttaaactcttctactattaaattttaagctttgtattaattgattattataaactttgtatgtgttatgattctatttgaacttattctactgctatacttattgtttatggcttcctaattatttatctaacaaaaaagctatttggaaacctgtaaacactggttaacaatgtttcacttatggcataaaagacttctgagcagttgatatcactcaaattatcagcacaggttggttacattagaacatacaagagctgatgcgaaagcagcaggattaaattgcctcacggagatgaaaagtggaaaaactgaaagcaatggaatgagattggtgaattaagatccataccttaacttcattaaagagtttcttctcccaaagaaggagcttctgaagcgtagaggaaagattgcgtgccccggttgttagatcaacattaaaatccatgttagcagcggaggcggattcagcatctttggaagtagaaggttgggaggagacaagggacaaagagggagcaacaacatgtaacatcttggaagaagctggtagacaggacgtgatcaggtaaaggtaagtgaggagcgaaatgtgaataatgaatagagagaaatgctgttaatgttaccttgataagctgcgtgctttcgattgtggggaagcttgccgacctcaaggatcttggcgatttgggcaccagaatcggaagccctctgaaatagaatctgaatctctttagcaacctcaattggattccgggaaccaggtcgccgggtacggaatgcggcgtgctccttggtcttgttcccatcattattatctccaccaaccactttcttatccaccacgtgcacctcatattctacctcctcttcgtcctcatcatcatcatcatcatcatcatgaatatcatgatcatcatatacgtcgtggtgggaggagggtgggggttcgtgcttaggaggctggacgagcttctgatccccatggacctgcttgacaacttcgtggtggtaatcctcgtcttccaaatcggggatcccctcctcctctcgaacctccctggaatcgcggctgggggtggccgtggcagggtaatgagtttggggatagtacttgtcgtcgctgttatcgaagaagttgaggaagtcccaggtggaggagcgaggaggggagggcggaggcgggggtggcttggaaacggcctggcgctgcggcgaggaagaaagtccggccgaatagggatcgtaggtgtaggggtaagggggatactggtaagggtagaaggaggaagaggaggactctccaacgtacatggtttggggactcatagggcgctgctcgtagacaattgaaggagcggctttattcttcatgtaattcatatgaagatggggatggggatgatctggtcctgagtagtaagcacctaaacgaataggagaggatggttcaggggaatgatggagggagggaaggtcgtcggagtcggagtggaagtggaggtgggagccggcggagtcggagtgagaaggagaggagtgtttggtggttttgtgagggggagaaggggagggagagggaggagcatcggttgttgttagcatgtcttgctgaatgaaaaggtttaaggagtgaccaattgccttgagggagttgatgtaggcgatgtgagctgcggccagtgcgtagcgctggtgaattgcttcgtccaggaaaccacaccgctcccggcaaagggccactgctgggagatcgtccagcttggagctggcacaccccatggctctttccttttccttttccctttcccttttagggtttctaattgtaaccaaaattgctatttaacaccacagccacagggaagaaagaaagagagagcagtagcaactatgaagcggggcagtacagtagagttactgggcaggcaggcaccaacataaaacaaccagttagtgaatgaatcagggaatcttttgccagcacggacttcttcgtccgtttcttttttttttattactctctctctctccttctgcctcgtcggtgttctctctcacttttatctttcttcaacttaatttaaacttttatttcattttaggcttcacccttctttcttattatacagttatatcaaatattttattttctattttcattttcattttcaactctatttatatactagtgtttctctcaattcatcacagtttcctcgtgtttaattaagagtgaaatttggaacataacatctgatatcatccgcgaaaaacacctaacatacatattcccactttggaagcttcaaaatttgacctttgacgcctgcctccgctctaatttatttccttttccggttatgccccttcctcctttcggttacaacttacaaccatctgctttcttattatattaaattcctcctactaggaatatcgtcgcctccttcaattctttcagctttatccgaactactacattacaattttgtttcctttttctactaaaacacgtaatttcaattcaaaaatactacaccatcttatcctctcacaattgctatatactttttaatgatactttcttaatagtattttattctaccgtatgagataatactttttatataattaaaatttatagtagtatataaatattaattcatatataatttatattttaaatttataataaaccatttaaattatgatatatattaatataaacaaaagaatgatattataatattgttgaaaaaatattttaaataactgtaaaatcaaaagtttcagttatgtattttaatttatattattgtttcatattttccctccaaatattaaatgaacaaggaactttaacattttaaaaacataaaaatattcaatgccttttcaaagtaataaacaaaagtatttaaaacaatataaatgtcatgttgccctagacgcagaaactaatgaaactatcccgctcaatcatctgtttctaataaaataccaaagaattgtccacatatggatgtgtttacggcaaacgtatcatggaatgaattgcttctatttttttgttgatgttaaagtcagatatgtagaatattcttttttcaagaattaatcctttgaaaggtcaaaaattatttaaagggctcatttatctcgataatttttttttagtttagtgaaaatgaattaatatcacgtgtcacccaatattcattcacaccaaataattcaattaaattttatattattctatttccaataaaatcttaaatccattaaatcaattgtagaatcttaaattagttataatacataaaaaccaatagtgtaaaatggaatattcagattttatatttattttattttttaaaattttatatagtaaatataaaaattgtgtaaattgatatgatatttttatttcattttattttatgagttgatattacatgacacgtcatattcattcacacaaaataatttaattaagtagattttatattattttattacttatagaattttaaattaattataatatataaggatcaatcttgtaaattgaaatattctaattttatatttattctattttttcaattatatagtaaatataagaactgcctaaattgatatgatatattttttgttaataagagtaaaaatgtaaaaatatagaaatttgttctattataaaatatacgtgtaaaatttaaatgattctattagtaataatgattaaggataattttaattgattcgtacaaataaaatttatataataaaatttaaatcaattcacacaggtatattttactattataagacatacacattcacaattttaattggttgttcaatacaaaaatttaaatcaacattaatttattttagatatatatttactgaatattatgtactatatatttatttataattttaaatgctttaaattcatcacagtttattttaatattttaaacaaatataaaaggacaattaattgattgtccaatataatttaatttgagttaattaaggtaattacaactaatataggaagcattttttgcatttttatttcattaggattctttctatgcttatatataccaacatattaaaattaaaggtcttccatacggttattttctttgattgttaatacggttattttctttgattgttttccttcgatttgcttaagataacatatcgcgaagctctcattgataatataatgtgatatttcttattttatgttaaacatgccaactctttttcttttgacttttaatgacttaaatttcttatatattaaaccagattccacatttgttcgcctaattaattaacgttatgaataactttttctcccataagcaaaaaagttctccaaactccccctcctctgttgccacacttttcctgagtattgtttgttgttggaatattcaagtcttaatactataatattgtattaccacttgttctaaaagtgtaataaggtcacaacttcaataaaaaaaaaaaaaaaaaagtcaaacaattttgctcagcagaagattacttaactgaatcaacctcttgcactgaccagctacacaacttgtatgacaatttttaagaataattgtcgcctaagtattactcctttaaatcacaaagccacgattgtcaatcatgcggccggcctctgtaaacataagccttacatacaaaactatgtattttgcaacggattttttacgttagatgtgtgacgacaagctcaaaatcacacaacataatgtctatattctctacaaatactacatcacaacctcaaatagatataaataattcatatatcagtattgttactctactaaattttgatttggcatcagaatctatgcaaatacacatccttttacttagcacataaagatgaaggagaacccaactaacacaacacgaagtaattaagtttcggtataatctcttatagcatatgaaacatttttggttaacactcatgacactatcttatatttagagagaaagttgaaaaagagaaaaattatatgtataataaattttttgatatgattagaagaaagataaaaaaaaataaaaaatattgataaaatatttaaaatagatgagtgtatgtatatcattactctatagtatatttatgtaacaattcgtttagaacactttcattaaaatacactacatttaaatttaatattagttcactataatttttaaatgcaatgtatatgtttaaaaatatttgtttattataaaatttaattaaaatataatataaattttcaaaagaatttatttattataaaatttaattatataatataaacatgtttattacaggtgttcaaaatattagttcacgcttataaaaaataaaataaaataaaaacacacaaagtcatttataaatacactagtaaacgaaaaatgatttttttaatgaagcaaacttatattaagttatgaataagtaaagagtgaaaacaagaaggactgaaatcaaacatttgtagacaaacataagatcttgatgctctagccaacctatgagaaatctgattggtttgcctactaacaaactgtatactacagttatgaatttcataaaaatttgtatcacagattcttaaaatgcaacccacttcgagatcatgaaatggttttgctttgaaagcatcaggaataacctggcaatctgtctctatgataatgttacccagttgctgatcttttttccagttgatagcaaataggagagtcttgtggagtttggctgacttggaaccaagaagttgcagcagcagcaacaccaaacttgttgtcttcattaaaaaaaacaacatccatattatacttcaaatatttcagattgaggtggaagtatatttcgccgtttgtggtgtgtgttccattcttgaagctgctgaaaagcttgctgcagagacaatccagcaggtttagtagctccatcctaaagcttctccctttcttctccgccataagcaccaaagtacagtaacaatttgctccacttttggctgttattgaatttttccgggatgtgaaaaatgaaattacgcatatcttccggagtatcaaaagcatgttgaagaatatgccacaaagaagcttccatccacacatgttgaatatgagtgcagcctaggaaagaatgccaatcattttcaataccatagtagataatcgttgcctggttgggaaacatcctctagctattctccaaacaaaatctttcatttttgcaaggatatattcaaattccaaatagccatccaattaccactttcacagagatgattgttatccaaaaaaatttccatgatacaaaaattcgaagatctaagagaaaaagccccatcttgactaagctttcaaataatcttatcagcgggagtgtttattaaacgtaaaggcatagacaagatattttcagcgtcattttgggaaaaaacattatgaataagtgcaacattacaagagttcaaagtgggatccaataagtcacttactttcatattttcgagtcccatgagaggaactgatggagcatttgaactatcattagaccgaatccatggatctttccaaacactaagtaaatggaaaatgtcaggagcatttattttaatatatttatttaatttaaatttaattattaatatatatatatatatatatatatatattaaattacattaaaaatatattattctgatatttaatattacattcataatttatattagttttttataaataaaattatgtctaatacagtatatcatgttattatcatatatatatatatatatgattaaaatatgttttagttactaataaattagtaaattttattttgagtttctaatatattttttaagttggatatacaatatattaaaatttttgttttaagtctctactgttagttaattaagtaatataaagtaagttaaaaaaattaaattataattttcgacaaattttcggtggttttaaaaccgctagaattaattaatgaaaaaaaaaaaaacaaatcttgtttcctggtacgtaaaaaaacccactgagaaacggatttaccttggcgtttagtcagtgagaaatggatccgcagatatggtggcgttttgtcactgacagtggaatcaattttttttttttttaatagtaaaggagtgattttttattataatttttgtattgtattattcccaaaccacgatttctgatttttctgttgaatcctaaaggtgtgatttttgtgttttgtgatttttgattcctctatctgactatctaacttgtccactttgatttgggttgaatcttgatttcttggtttgaatgttatttgttattaattctgagtttttttttttaatctgagatatggcttctctctatctgattaccatcactcatttttttttatctaatttttattcgtttttttattatgggatgaagattgggatttgaggaaattttttttttgcattaattaattctaatgattttaaagctatcaaaaagtataatttaaattttaaaataaatagtgataattttttagctaccagaaatcagaatttaaaattttaaaataacacatcatcacttaattaacaacaacctaaaataaattttaatatattagaaatataatataataatttttttattagagactaaaaaaaattattaatttatcataaacttaaaacataatttagcctatatttatatttatttaactattttaatttttattaaaaatgtttatactaataaaaaattagttttatattgttattatatcatttcaattctatttaatttctctcaattttgatgcctctttctttctttcatatgatgtgtaatactaataattaactcataaagctctttttgttttaataaaattaaagtaacaatccaaatggtcagcttcccatgtattattattattattagaagaatcatgaagctttgaaaagatagatgtccaacaagaaatcctgtcaagggcacttactgaatggagtgggagaacaaacatgaaatacctatgaaagccaataagattgagaagataccctatctgtaccaatcagcgaataggtgtgaggtgtcattgccatttggctcactcacacttacacactttatatctgctccttcatatcctcattatcttgttctacgggttgtgaatttagtcacatacaaatttgaagaaattgtgttgacaaaaataaattgtgtaagaaatatttaaagagaatatacacttaacagtttactctaaaatatatctgataatttaatataatatttttttaaaaaaattaacagtacaaacagttgatatttgaagaaaacttttagcataaaaacgtgaaaataattaattaaaaaaataatttgttgtgaaattttggaagataaaatactcaaactctgagaaaattttcaacagtagatcacaaatacacatataagtaaaacatcactttcaatccaaaatcttaagaaattagattaatttgtgatttagatcacaaatacacatacaagtaaaacatcactttcaacccaaaattttaagacattagattaattagtgatttttttttatttatatattacttaacttattaattattatctattatgagatttcacctttatattttagcttcaatattctcttccttaaggctttgtttgggagaggaattttagaggagaagggagggaagggaaaggtttaggtggtgatatctccttgtttgagaattttaatttttgaggaaaaggatttgaggatttttaaaactcctttaaaatcctccaaagcctaaaaattgttgttcccccaatttgggggtttttagaaggaaaaataattaaaattactatcttacctcagctacacattcaaaaatatattaacatatatttttaatatatttttacatttaaattatataattttcacatttaatatcttattaactctcaatttccctctcttaatatatttttaactcccaaacaaggatgaagaaattttcatcatttttctccctttccttcccctcccttcccattgaatctctttcctttccttcccctcctaactcccaaacaaagcctaagtgtgagtctattttatataataattttttttcaaacaaaaacattttttcatccacgagatatccattgtagctaccaatatgcctttcattgttaggccttaagagtttatccattgctgccaacatgctttccaccatttcacgacaacgaaatacatgtttggcttccatgttaacagaaagacttttgatctttatatatagacccacaagggatcctcatgcttaaatacaccacaaatttcattataatcatttgaacaggtcacctgatcaaactattgattctgatttcagttgttatagtgttgtgcataggatgagaataaaatattggagagatattaatcaccaatggattatgaccatgatgaccaggcagtaaactctatcatatattttttaaaatgctaacggtctaaaggcatttttaaacaataaaatgaactatttctcaagaatttaaaaaaaaaaaaatatatatatatatatatatatatatatatattattcgtgtgtgtgtgagagactattgtgttatatagagacaacattttcctactcaaatataaatctcggcaccaatattatattgattgcgggtggtaacgtgatttggaagtgtgtgtggtgggggggtcccaagccatgattggtaatgtgttgtatgcaccaaacaaacaacaattgaatgccataataccacgtcgttgtctcatcagtcacttcttttttttcacaatgttcttctgtttaatttacgtttctaaattctacatgcatgctagtttctaccagcatccacaaaaagcatgcaaagagaaaataacaatcatgcatcttcgtcttagggaatttccgtaatccgtagttaatattcgatctataattattctgtcgtatatgtcatgtatccagattacaatattgcaaatccttgtggactagccgccgtatttgaattgagtcggttctgtaacttttgtttgacatacaatattgtattttcgcgagggagaatataaatacggtcgaaaatcatatatctatgcaaatgtgaaatcaaattactgctaccagagtcatacagtaataatcaatattgcccaatccaataatttattttatcattattgagttgttgattggatgcctttgcttgcatttaccactccatcataagcttcgccagtactcaaatccctgttgagacaattattgcagcactccggttttttttccttcaatttttcattattcaccaagaaaatgaatgccctaccttttgttctatttttcttttaaaattttgtccaaatacttattataaagttttagtttttacacccacaatcaatcaaaaatcatcttaaaaaagtctttttgggtaaaattattcagtaagcacttattaaaaaaataaaataaaaagataaaatgaataaaaaatttataaaaactcgtccaacttataaaaaaatgaggtatataagttaattttaatttttgaaaaaaattagtttgcttcattttttttaagagaacataatacgagtatgagttaattattcgacattgtataatttttttgggtagacattcgacattgtatatattaatataagataaaatattatgtatatgggtcaatcacttacacgagatttaatatattcatctttatttaaagtgagatttaagacgtattaataattaaaaggtgtcatatatattatagatcaagaagaaaactagcaagacaaatgtaatttatggtaagtaagacggtgttgattattaatgtaatttataggtcaagactcaagaaaataagctgttgtctctcaaatttatagtctctcaaaataagctattctcatccaagaaaatgtaaattgtctttgttaccctcctccctttcctacacccaaaacctttcccttatttccatcaccatcctctcacagcacccccactcccttctccgatcttttttccttacactccaataggcatggcaacggggcgggacatacccgtcccccgcccccaaacctgctctccgccctcgcccccgtttcccgttggattttaaaccccatccccatccccgccccctctgggggtcgagttttccccgcctcgccccgcccccgctatttaattaaaatttaaaaaataaaataaatttttttattgaaaaatcggataaaaaagttaattatgtaacaaaaaaataataataacaaacccacatttaaaatatgatatcataattttaaaattacaaaacaaaatcagccaatttaattaaataaaattagaaaataatatttttattattattattatttttttaatattatttattacagggcgggggcgggggcgggacgggtatcagtaaccctatacccgcccccgccccgcccccgcttttggctaccaggaaaatccgaacccgaatcagaaaaaatcgattttttcccattaaaatcggggcggatttgggcgggtacccacgggttcgggtcccgctgccatgcctacactccaaactccaaatcctaaatctttcaagtccattttttcatagaaggaaggtttcttaaaaaatatatattagaatttgggtacttgccatacattcatctcgaaaagttacatgaaataaacatattataagctaaaattgaacatgagtcaaaagttatgtcatgtcaaacaataatagaaatataaatctgttttagaagtatacgataaaattatatttttattctatatatttgagatgaaaaaataaaacagaaaaaacaattccattgtaaacaacgactaacttactcttatttgaaggtggataaatatacccccttattttaataaagtcacctgtatttagtttaaaatattatatttttcatattgcatcacctaattttatatgtttgaaccctctcacttattgtcatgtgagggtaaacaaatatatatacccctttattttaataaaatcataaatatttatcttaaaatttaatatcggacaccttttatttttatatgtttgaacttactaccttatttttatgtattaaattcattttttaaatagattgttccaactgacctctcggatcctagattcatttttgacgaaaaaaatataaatatgataaaaaatgcaatactgcaaaaagaaatgaaaagaaacaaaagatgttatataggtatttataattaaaggatgtccatgtattataggtcaagaagaaaactagcaagccaaatgtaatttatgttattaaattattttacataaaagttaattaacgaggtgaaaacgaaggtggacactttctttttagaaaaaatagaagtaaaagagaggatgggatcaggtggagaatatccggataagggcgaaacgaaccttcagggtatttatttttttttaattatgaaatagagataaacttaaataaatatcgagaaaggagtaagtagtatgatattcatgacttctaagcttaaaattgtaaatcatttttcaacttttattttttttctacgaaaaaagtcataaatttttttttatgatgttttaagtttttttgagtacgaccttaaattagtaaattatttccaactttaaattaatatttttatttttgtattttatatatttttatttaatattttatatcttttaatattattttatttaatattttctatatttttttcttaattttaaggttttttttcttctaattatagtatattccaattagttcgacttcaatgtcggacatatagtcacaactttattttattagtatttcatttatagaaaatatattaaataaaaatataaaataatataatatactaaaatataaaatattaatataaataaatttatttacaactttagtatataatttacggcttcaaaatttttaaaaaaattaaaaagtcataaatctttttacgatttcaataaaaaaaattataaaataatttactactttcaactcaaaattagtgagatattttatgatttttctctttctaaattttaatttaaaatttatttttattcaataattgtttaaaaaaaatcctaaaatgtggtttcacctgcatataggcctaccaatcttttagggtcatgaaatcagagagagagagagagagaggaacttgttttctttccactgagctgatggggcaaggattttaatcataatgttgtcataggaatgtgggaaagttaggagagcctccaaatttcaaatgtgttattgctcttgctctcatgaattgcaatggcccccacaaaggctttctcatgaattttcatgttttttatgtttggccttgtttggtacaagtatatgtgcatgtgattcactttatacgaatcccccgtcttttctattactataaaagttttagttacactgttcaattttttaattcatgttgaatttaaatctttaaataaacccattgcattgtgttttataagtgatactaatagccgagggcagagaggaagaagaagggtacgtacgggttcagacactcacgtgcagagcacatgtgaatatgtgaatatgtgaatatgtgatgcaatgcagacccactcagtccccaccatgcatgcagtcatagtcatatttactaaatgaactgttcacacatttacttatttccatcttctataccaaacaagccatacatactgtaccaaaaacaaaagccatacagatatataaatatgactatgactatttttttaaccaattaatttaattactttataatttattttatcaaaataaaaatatttaataaattaacttattttattattttattatgtttttaaaagttaagactttgagttcattttttttattattttcattttgtctttaatattttaaaaccttctttatttaccttaattttcatctttataatacttgtttttatctaaatttttttcacgaatcctcaccaccaccgcccattttagtattgcatttttaaaaaaattaaattatttacattctttattttaatttttaataaaaaaattaatcttacaaaatttactactatatctttgttcataaacttaaaatatcatatatagtattcatgttattttaattttcaacttttttaaataaaaaacttaaccattttttgttaaacaaagtaatataatttttttataatataaaaaagccaactattaatcataaatgcactttatttattagaatatgtgttaattcataatttaatgtaactactgagtacaatttgattgtaagggagtgtgggggctgggggccgaaattaacaaaggggcaattatttatggaatttattaaatgaggataaattttaaattaatattcacaaaggggtaagttgcatggtattctacaatttttaaaaccaaattcataaattaattcacaattttttattattgaaatcataaaaaaataaatgacttttaatttttttaattacaattttgaagtagtaaatattttaatttttaaaatactatttagaagtcataaacatatttatttacaacttcaagtaatacctttttctatatctgtatattattttatttaatattttctatatttttatatattattttttatttaatattttctatatttttgtatactatttgttttaatattttttatattttttactaattttaaggattattatttattttataaatttaaaaaataatgtaaacgaaagacttaaatttaaataaaaaacattaaaatggaagcaaaaataaatttaaattacctcaatatttaagtctatatgttatgtttgatcattcaaaacgactagacacattgtgaatgtcaatcattaatcatatatataatgagatgaacaaatcaatttcaaataagcctaagaaaaactcattgtttagaactgaaagacataattataataagtgtctatacaagtaagttgatgactaatattgtttgtactttttaattttatgtttgtatttagtttgtattgttcattttatattaatgtattatgttatttttattttaacaattatttttattattaaaatattttctattgttaatattaaaataattttatcaaataaaattatttaataatactgtatgaaattattaatttatttaatgataaatgtaaaaattaatttaaaaatttaaaaacaatttaatattatgtgataaattttaagttaaaattatttgttaatattagtaacaaaaatattaaaaatattgaactataaattaaaaattaaaaataattaataattattaataattattttttaaaaaagtatgattttgaagtcgtaaatatatatgtgacttctaaatgttatttaaaaaatttaaaatatttatgactttaaagtcttaattaaaaaaattagaagttgttattttttatgtttcagtaaaaaatagaaaaataaaaattttgaattaatttatgattttgattttagaagtagtaagaacatctttaatggtatatctcaaattaaaatcgatcacttttctatagttcctatcgaactatataggattgaagatcttttaagatatttctaattttttatttgatagatcttattttgagattttaggaagagagaaagagcaagaaaaaacttattcttttttaaacaatgtgaatattgtaagagttattttacaagaattcattcttcatgttagagatctcttcacctcttttaattggagatatagtgaaaatcttgaattcaagattttgtttaagatagtgttaaagatgttatagcttttcgatagtattaatttaaaatttattcttatttgataaatttaaaaaataattaattcttttgataatttcgcggtgttggagccaataagattggattgcaaatggcaacaccaaagcgcttcatagttacgctaatggtcccaacttgaaaggacttgtcgtcacctttcaaaggattgtcattgtccattgatgggtttcatgattggtgtcagtttttggtagtggttattaagtagagccaaaaactcatacaaagtctcctaggaaaaataattagtgggagaaaagtaggaaactatttgttggtttaattatacaaaatggtgaaagaagaagaaatgtatttttttcagttcacagattaaactgtaagaaggcattctttcagctatgaaatgccacgccatgatagacaaatctttttcattaacgttttaataaaattaaccaatagcatttgtcaataaaaaaaattacaccactaacaacggatgattatgcataacatttttcttattaccaaaaagaacacaaaaatagcacaaaaatagcaataattacttaataataagtcaattgtttaaattttaaaaaaataattttttaagaagtatatataatttattttaaaaaaagcaaaaaaaaaacttttttatcaataaaaacactctggtaaaaaataagtttaaataaatgggatcaataccataatatgtggctgcggtaaacattaatgctttgtttgtttgagattctctatcatgtaaaggataaattttttcgttcagcttttttaaaagaatatttttaattttttacaataaaattttatttggttaaatgaaaaacattaaatatttttaatatttaaaaattatcacatatgtataggagtttgctaatgcactcacactaagtatttaagtatgagtacattagcaacttataccgtaaatctttggaaaaaagaatccatcatctcttcacttgtaataaggatatatcagtaatttaatatcaattttttaaaaacaattaaaaagattttaattgttttttcttgctttcttttctttttctttttttaaaacaatttaacatgtttttgagtcttacaatcttgaatttttgtttatttacatcaccaacatattttttcaagggaaatgtatttttaattaaaatgatggtataaaaataagagtctaattttcatatattgttagtaaaaaaatttatattctcgtcaaagtagaaattgccgtaaatatggcttttcaaagtgctccttaattaaaccaatcgaaaaaaaagacaaatttactaatcaagtgaaggtataataaaaggctatgataaagcccatgagaaaggcaaagcaagacgaatggttcatgcaagtactgggccacagagtcaattcaaatccagaagggtggatagtccggtagttttctccaagtgcgtttagaaaaccacacacaataaaactcaagttctctccgggtgcgaggcaccaaagccacacaagaaaaaacaagttaaagacaaaaaagagtttttgaattgtaaatttcattttttggacatgtacaactaaatctttaaaaatatctaaaatggtatggaacactgacgattctgctatcctgaacagttaacactatgatcaaagcaaacgaacgccttaacgagtcttccttctagaagcttcaaactctatacaattgctacttacagtctacattttttcccaagctgaatatatatgtacaaattcaataccgtcggtccatgaaatcattggtgagataacagagttaatcggagaagaattcttgcacttcagctaattggtccgtggtcattagaagagggagtgaatcaattttagttccattggcattgagcttattatctgctacctcagaccactcctgctgctcttcaaactcggtaatactgttgtgattttgggggtaggaaattcccccaccaccagagttttgacatatgcaagctgatgggttctcggtaaactcaccactcccgggtctcaactcatttggttctcccataaagcctacctggaatgttcgtactcgagaggcaaattcctcccacgtcctattatttctgttcatgaataacaggttcaacttctttgcatttggcctgatggtggctttatgacccaagtacctccttcttcctgctaaaattttggccatgttaccgttgttgtttgttacaaatacatcactctcgtcacaaactatgaagtctagtgcagccatgcgagaagaaaatgacacaaatggcgccaactcctccttggtagctatggtctcctttgaatgaaagtttgggaaaagagccttcaggggggctaacgtttcctggcctccatatatttcaccagatgccacgtacaagttaacttcacttccaaaacctagtgctcttagcataagaccaacttcctctggggtaagtgggcatcttccatgtcttcgaactttctcaggattacttgcctgtctcccatttccaaataagagagaatatatcaatcaattttcgtacatgtggagctcatttcttagatgctactaaaacctttacatgtaattaataaaaaaaaccttacatgtaaatttttccatcttttcctaatttcaccaagttcttttttttctttttctcccccgccataatagcaaccagagaatgcaagcatatccggttcaaacctatgtgataaaacatcagtttgaatcacattgaacttctatatgaaaaatgaaaagaacttagcgtctcaattacaaaatgcgagttaattttataacttaaagaagctgatgaaattctgacgttgatatcatgctgcatattgcattctttgctgaggaactaaatgaaccagaaataaagcttggctataattattaaagcttaattacctcaaatgtagagcaatgaaatgcttgcctttcattttcatccgctcaaccaacaatttacccatcccctgaatggaatccgtaaatttgagagcatggtaattaaccctgcacctcagcctttgaagatcttcatccaacatattagcaagtctataatcaaacttagttaaccgaacagcctgcatgcatcaaggaattcaagtatcatccatcgaatcaagaacaccaccataacgtacttattacaatagttgaagattagcaattgtcacagtatatgatagcttcgaagattttttgttttttaaataatatttccaagacactactacgtgtcactactttttttacagactcaccagtcactacttaagataatttccttattgtattttccttgagagtcaaccgtcattattgcttaaataaatttcaattttgattaatcaatgttccataaattcttcatttagttttttgttccttatttatatgtttaatcaaatatcaaatgttctactaaaaaaatcgattatcgattttttatgattaaaagctctactcacattattcatatcaaatgtcatatattttcaagtaaattcattcatacatattcatttagaaaactccgacttaaaagtgcattaatcttttagtacactctattcttaacttctattcttttaaattttaattataatatttttaataaattatgtatatttataattttaaataaatttaaattttaatatatttaaaaataatctatagaaagtacaagatacttgttagtaaaattaactatttttgctcaaccgtaaaattaacgcaactttcactagaaaagtccgcatgtttgaattagattattttaagaaacaaatatttattttcaccttcctgatttttttttttttataaaaataaggaaattagttgttaatattaatatataaccaaacgtgcactatagttgataataaaaaaaatgcgttgaggctttgatattcatatacaacagaatggaaaagaataggaatattttcccccctgaactatttatatgccaaaaataacaaaagatttcagttcgtaagagaaaaaattacccaaaactagcaatttgaaatatttatactactgagtgcatttaaggagttataaatttggcaagattaagttctataaaagaaatagataaaataaaccaaaaaaaaaaaccagaaaggcatgcagcatctaggctcaaaacaggggaggaaaagtccagattttaatggtggaatgcaggcaaataattttgaggatgtgaagacttacacgcttcctgaccagcacgggtaaaacacgatcctcatagcacttgggggtgcatttccttggaacacgcaccgtatatggagccacgaagttccctctcatatccggaagctcttttacaattctcacgtcattccggagaaatgttataaaccagtctgtatcaaatagttcagaaaagttgctgcaaaaaaatagcacacaaattaagagaccatgaatattgcttccaataaaaatatcatacatgatttacaaggcaaagacagacctggtgtctttccagaaagatgtatgatccaactctggaacaacaagagtagcattcaaaagatatgcagccaccacagcatcaattatctgcaccaataatccagccacagaaattagccttcttcatgtcacttaaatttgtatccctaaatcacatattatattggtgtctgatagccccgccagacaaaactctcatcatatcaattgaatttagagcaatagcatatgacatatttcagataaagaaagaaaggaaccatccatgttggttacatacagaaagactaggtaaatcttccaatattgtttggttacctccttgaaaccataggtattgcatatgagctgataatagatagttattagttgatgaagaagcttacccctgttctctgttgatttaaacctccactggtggcaatcagcaagtatcgatctggattcgttttgacattagcatctgcaagtgcaagaaacaagtacttacgcaatcaaattgcacgtccaataaaaaacgaatgaacacacggcttacaatttggttcaatttaaagtccgaaattaaattcatatattggttgcgagatgagatgattgggattagctttacttgcaaaattgacaccggcattactgcagccatagaagaggcgtgagtgcattgaacgccataaatcacgcctgcatctacctccacccgccttcaaagtccaaccaacacaaatagattaagcaaaataaaatgcagaatagtgacaattgcgttttagttactacttaatagcttaccggaacctcgaatcgtgatctaacttggtcattgttctgagtctgaagattgatttcatttagcggggacggagcgaacagagagaatagggcgaagagcagaagaagggatgcggagatggcgatgatgagagtgcggtggaggagccgacttcgaaggaaactcacaaccaggagtccgattattctggatttctcagtgtgatgcttctttctcttcattgctgttgctgtcgttacgtaccttaggccgaatttcattaattcgatcaatattgcgttgcttaatgctattgattgcatggaagaagaggaagcgcattcgcagcaacgacaccgtttctcgcattttccattttgtcaccttttctttgaagaaggtggagaagagacgacgacctttcaacagaaacgaacgcaaccgcacgtaaaatcgatatacctgtgagcggaattgaatgatcgatcaaatacaatgcatatacaacaatacatacgtatctaattaacccaatcgtgtcaatgagtcatctaacttctaagttccaactccaactaatcccctcgtaaattttactttctcaccaaaccaaaatttcaattaagctcgcgttaatcttgtatttaacgttgagtacttggtttcgctgtccaagtttgattttgactcaaatgtttacaatcaattccatctctaaactctaaatatggagtgcatggcaagtttcttggatgcttgactctaactaattaaccagcggattctctacctatatttggaactcaaagtctgttacattcaagctgtacttactactgttatatatattctgcttttgggttggagcaaattcttactcacaactctgttatagctttcattacgacttaccactttgttttctttcactatttacattacataaattagttttaagatcattatcaataagaggtgattagaaacagtgtgtttgttgagtattgggatgtgaaaaacatataacatgtatgtatctcattctaattatttatttttttactccgattatattaacacaagttccttctacaggccatttttattgattgtatttacaattgaataaaatattttactaaaataaacaggtagataaaactaataaatttttaaaattatgcttttacttgagtttatttcaaagaaaaagttattttttttaaccatgtttctaaaataacttttgaaaaataattatttaaaaaaatattcttaaacatgtactaagaattctaattttctgataactgttatttccttgtgtaatattacgattgaaaatcaaagggaaagagaaaagtgatttcttaatggatacgtgggcactgccaacaagtaacaacgacatacattgattgatgaacatttaaggcacaaattcttctttctgcaccttaactttattagtacttatttatgcaatcccatcaaaaaatttggttgctctttactactcttcacgtgtgtttcatgtggttgcatgatctcgctctcgcgtttcattcctctatgttacggttacgaaaccaaaattggagaaagtttattcgtaaatgtagagaggagttgaagcacaagctatctatcaaaatagatgtaattgatggaaatagtgacgagtgaaatgtgaaaatgatcaaattggtcttacaaaattttactcaagttattagttcttcttaatctattggagccttgaggctttcccggttttattgtatgttgatgaagatattattttagtagtgttaaaaagagagtttaggagagtctgagtagcatttttcattttaatattgatctaagataaggtaatgtttgagagtatctagaatcatactttaatatttcaattagttaatgggtgaattatcaaatttattttgaaagggtgcattatcaaattaataatgtatgaaagaaacatttcagggctttttaaagacttaatcattttttccattatgttttaaagttgttttgttttgatacattaagttttaaaaatttcattatgctcattttttaaatgtatctttttggtctcttttttttttctttcaatttttcgacgttagtgttatgttaacttttaattttaaaaaaagaccaaaatgatatatttaaaaaatataaaggaccaaaataaaacttttaaaacttaatgtatcgaagtgaaaaaaatgcaaaacataatataccaaaagagacattaagtcttttaaaataattaactttacatagtagcgactaaaaatagtcattatctttattttatttaaaaataactaaacaactaaaaaatttcaactcctccaacctcttccaaatttgaaaaggtaaaatattcagcatcacatagattgaacgacgtcaacacataatctccctagaaccacaaaaaattcttatactctttacaggaaaatcaaaacatttcatcagctatgctattggaaacaaaggcaggggagatcagagcaaaaagtgtcttcaacgaaagacaaaaatatgaccttatctcgccaattaattcagatatgaacgaggaagtcataatgtgactctttgtaaggtttgcgagcaagatctccactgtcgtgcacgattgggtgcacgattagactgaataaatatagaatttcccattcaatatttacaattgggaaagacaaaaacgagtaacacaaagagcggttaaatagtgcatttcattggaagatgattatgactggtccgatcggtcaaacctcatccactatgaggcattgttggtctttttcttcgctttcgtcaatgcgttgttgtcagtgtggcgatgagacaattgttgttgttaggtgaggcaacaattatggctacgtagggaggttgcggcgaagacataagcgggggcggggcaacgatctttttgggttaggggcgataggcggaaggagaagggacccttacccattgtaatttagaatgattagtgaatgaaattattatcattattaaatgattaaattgaatgaagataataataataataataatagagtgaatgttgttgttgtttgtgatttcaaattcatattttcttcatttattgagtgatttttaatttttaaatataaaaaataatgatgatttttagttaccactatgctaacttaactattataaaatttaaaatattggaccataacgcttctaacaaaaataatgtacaaaaaaatgatcaaaacaacacattttaaaaacataaataatcataataaaatttttaaaatataatgtaccaaagcgaaacaactctcagaatataatagattaaaagtgacattaaatcattttaaaatttaaaaattaacaaaacagaaatatttctaacaaaaaatttaaaatatgatatattttgaaaattttaaaacttaatgttttagaatgaaataactgtgaaatgtaataaattaaaagtgacattattttttttttaaatgaacaagttttgattttgattttttttaaaagaaaaatggttttttttatttttcattgaaatcattattcttgatcccagtaacatgaatgaatgttagctttgccggataaaatcctcagcgtggcaatgggttttgtatagaaggggagtaaaaccaggcattttcttcttctgtactaatccccctgttgtccttgggtctaattttacaatgtctttacagctttaatccctctttttgcaatacaaatatattctgtgtcttaaaaaaatgttaattttgatctctgaaaagtattttgattttgatttctgtcctaaaaaaattgaattactatttttggtttctaatgttcacttgaagctagataaaaaatatttatttttaagataattttataaaatttaataaatttatcatatattttattattttatcagatgataatgtaaaattataaaattattttatacttttgatatataagttaatctgattgattagaaagtgttttttttaataattagcggagcctaaacccagaaaaagaaaattacattaaaactaaatgtggaagaaactcctaaaacattaaagggccaacatctgtttaatctggtttggaggctccgcatctaaaatcactgcatactccctccctttcaatggttagaattgctaaaaattataacctagtcaattaatataaaacaatataaaataaaacgatatatttgattatttggttataattatatatatatatatatatatatattctaatttctaaaagtaagctaaaaatatttataagtttattttagtcggattaacttgtaagttagtcaaatcaataacatttaactagtaatttccaaatgaatagtcaaaatattaatttttgtttatttattttatgaccatcccttacctgaataatttaatccatagtgctttaaaatttcatctagaaagagctgaacgtgagcgaagcggagacagctatctatttgtattgcagagggagaggaaaaggttagttggcgacgatacgttctgtgggctgcaggtggagtcgagtctgcctaattatttgatatttatttcgatgttgatggattattgaacttttttctttcttgcagtgcaggcggtgatgctcatggaggctatccatttcaccacctctcaataccaacttcaatatcaatatcatggagccttccccagaagacccttcctgcgcaagcgcaaccatatcagttactgttatggccaccaccaccaccaccaccacttcctgcgccaaagccccagcctctccgctccgttcatagcacttggcgctaaaccctcttccttcacttctcaggaccaacaccattcagattctgcttctgtggatgtcaaacgagagcttatatctcttactctccccgcccttgccagtcaggcaattgaccccttagcacagttgatggaaaccgcctacattggtcgacttggcactgttgaattggcttctgccggcgtttccatatccatctttaacatcatttctaagctttttaatatcccccttctaagtgttgctacttcctttgttgccgaggacattgccaaggcttcctccactgcagatgccaaaacaaaacaacaactctcctctgtctccactgctttgctattggcactctcccttggcttttttgaggctttagctttatacctgggagctggagcttttctccatttaattggtgttcctacagtatgttttcgccctctcctttatgcgttttatttcttgtatcctcttccgagtatatcatttgtcttctcctttttcaacagcaaaatccaacatatgttcccgcacgacactttctctctttaagagctgttggcgctcctgcggttgtactttctttggctcttcaaggcattttccgcggttttaaggatacaaaaactcctgttatatgtctcggcaagtgtttgctttctttcttaatttctccttttcaataccttttctattttctgcatgtactctaatacctttactcgcaattcatgaatacattattgttattattaactagctcgcatgcaactctaaggaatgaacaaaattatcatagcatgtttgctgaagagtgagagggaattgatattttagttgattggaatacttgtgacttataactaaattacatatcccattgccaagagactccttgctatgcgaaggtaaaggggagggatattgtacgcagtcttacccttgcatatgcaaagatgctgtttccagattcaaatcgatgaccaacaagtcaccaaggcacaactttatcgctgtgccaggactcgccctctacttgtgatttataatcttgaaaaataattttagattttgatatcataaatgttcttgctgttttactttctttttaaaaataaaaaaactaacataccacagtgctcctcatttcccaaaggtatgggggaggttaattgtactcagtcttcccattgcatatggaaagagattgctttcggatttgagcccatgaccagctgtcaccaaggcataattttaacattacactagggattgccctcttttactttctttcaaagattgattaaatttaaaaatcattttcattttcattatattgtatgtatgtgtgtgctaattcctctttcaaaatgcaggcattggtaacttttcagctgtcttcttatgtcccttacttatgtattactttcggctgggtgtaactggtgcggccatttccacagtcatctctcagtaagtccttttcaaaagcattacttttttctttatttctttacttgattcaaccctaattatgatggaatttttgtacctcagatatattgggaccatgttgatgatctggtgtctgaataagcgagctgagttactacctccaaagatgggagacctgcaatttggcagttatattaaatctggtgaggatttgtgtctttcttattatgtgttgttaaaacctgagatgaaagagtgtgtttggccatcctcttaaaatgattttctctttgttgaaaaagtagggagaagggaagataacaactaaaagctaaatgcaatctcaaacactgtttacaaaacactttccaagcaaaagatctcacctccattttttttccccttgttgtttgtaatatttctatttaaaggaattagcattaagagaacaagtgtgtgtttggaatggacacattactaattttgtaagctggcccaagttgggaccagaaaaattattgttttagagagattattaatttatgtatgtttaactttaattgcatggacacatttctcttttctttactgtgtatattatttagctttctgttaggttattgtagatgtttcagttatgatctgtgggctgttacaggtggtttccttcttggaagaacacttgctgttctttcaaccatgacattggggacatcaatagctgctcgacatggtccagtagctatggctgcacatcagatatgtatgcaagtgtggttggctgtttcccttctgacagatgcattggctgcatctggtcaggtattgaatcatccattacaaaaacttgtatatttttctttatcattttatctttttaatttttcccccttgtggtataatttcctaaatttctttcaatctagtaaaaataccatgctgtcttgcaatgaaacaagtcgagccaacaaaagccagacaaaattctgggtgcattgtttgaacctcttgggaaaattttcagtttgcttgactttgaaactttttaacattttaaattcatagattcttttaagcttggcctttacttcgttactgtcttcttgtttgtatatgcctttttgcttatactgctatattattatttataggcccttattgcaagttctgtatccagacatgaatacaaagttgtgaaggaagttactagttttgtattaagggtaagcgcttttttttttttttttatggattgaatttttagcctttgatgcctttcattcattagttattcttagattttatgtaagctatagttgttttactatgtcaaataaggaagttatatgaaattatttgagaacctgatcatgcctttccagattggactggtaatgggtatttgcttgactgcaattctgggtgcatcgtttggatctttagccaccatttttactcaggactctgaagtcttgcaggtggtcagaactctggcattggtatgtatggtattgctgattgatttgtatgtatttgtttgcatttgtctgtgtctgcatcaaaattacattgttatctgtgattgttgctagtttgtcagtgcttctcaaccatttaatgcactggcatatatttttgatggtctccattatggtgtttctgatttccgatatgctgctttctccatggtaagttgtttacttttctaaatgtgtcacgtttttctcttctggtatatatgcttcttgaggttaacttttatgacaattgcttcatagatgttcgtgggagcagtctcctctgcattcttggtatttgcacctccactttttggccttcagggcgtatggctgggcttagttctcttcatggctcttcgtgcggcagctggtgctgtcaggtaaaatggcacattaattttgtgtgtattgggaagaaatgtttcatgttgtttctatcttgttttaaaataaaaataggttactctacccattgtatttgactagatggctacttcaaccttcaccctctactatttatccatctttgattagaatattttcctatacatcttgggctgacaattaatttgatctgatggtatttatatgatagaagtatgcatgactgatcatactatactattatagtttctttatggaatggtgtataagtgccatggttttaaccttgtttcaattgttaaagtgctttttgaaaatctgtgtctatagttgacatcttctacatgggttatcaaatcttctagtgaaattgtaaagcgttcattacatgaacattaacaacacctttaacccaaactaattgaaggcggtggtagatgaacccaatgatagatacgaggaggttgaaaaaaaaagtaaaagcaaagaaggggaaaagaagaaagggggatatgatgaagaaaatgactaaaaagtgaccatctggaacatagggataacaacatgtctaaccctccaccaagcttattaagagaaagaaatatagtaattgagtgtatcaccctgtcctttcagtagatttgctgatgctagatagtgtggttccctttttgaattgccaggttgtgcttttaaattttttttccccttttgtggttgaatcctttgtgcttctacattttcagattactcacaaagaatggtccttggtggtttctacacacagatttacaaattgcggaggtcagtttctattttacaattcctatcatgtctctgctttttgattgagtaaagtatagttaacatcattgctggggtttattttctctcgacttgtgaaaataatattattatttttacctttctgtccttggttttgcttatctactcagctgctatattttgtgcaccaaacagtaaaaggttatttctagaaaaaaatcttccttgatggagtatattagatgctagtagaaggtgtaagcaagctagtaatgttttggaggtggaaagcatggttcaagattattggatctatcttacaaagtgatgagaaatttattgcagagtttgaagggtatacatatagggttgaagatggtcagatgaaatggagaaatgctttaggcatgatttgtgattacaatgtgaccagaaaactataagactaatgccgctcaatgatgggctaacaagagctaatgttgcgaaaagaggaatgttatggtggattagtggacataaagtaggagtagcacctgaagagatgatagaaacttaactaaggtcgtttgatcatgtaaatcaaatgagcatagttcaattaagggaggtaaagaaagatctttggtgaaaccattcaaaaagaccttgctccaactcattgagtacattggctttgtttgatctatgcagctgacctaactaatgggataaggccttgttgtataccttctgtgatccttggttaatactcattttctgaagtttcaaggtgacttttaatctgattgaaaatgatgttacctgtaagtcggaatgtgtatgttgatgctgatagcctagtgtcctgtttgacaatgtcactagaaagagcaaagataatattagtcagcatgatcatggcagtgtgcccatttatgaagagttaatttttgcttcttgttagtttattggtgaactagggcatgcttaatcacttaaagcagatattgaggaaaataatttctaatttatttttctgtgttgattaatattattatgtgatattgctcttaacattctggatgggatattcatatctacgagatttgttatcttgatcttgtaactcatgtttgcaggtggtctcgtgagtctttagatggagaatatggatgcaacactggatgtgacattttgaagaggattctctccgttggatattatatttagatgtgtagataatttaagacattttagaagcactttctgggttctctcaatgaaattagtcaatgttactttgtaaaggaaaatggtttaatttagtcaaatattatatagataaatacacacgaccttaattgcataattttcactatctaatcacatttattctagtttcgttttaagcatacttgtccggactagaggatcaactgcagaaaagaatttgtatcatatatatatatatatatcagcctatgaatttgaaactcaattgaaattacctctaagtcatgtcagtgtttggttttttacggtattaattctttcctacttttctccttccttgcacttgaggtgatagcatgtttccaacaaaaaaaggttcctacgtgaaaagcggagggggtggaaggcagtgttgttcgtttcaatcaacattacattacagattatgtggatagagaagcatcctttgtttgagcaaattgacctcaaacaatggacaggttacaagtgactttggttgagcaaacataattacatgaaaattaagccgaattattatagggtgagccttcaaccctgctgaaaaatagcaatagaaaatgaactttgattacaaaaaactggcggaggatatttgaaaaagattgtgcatagccatgggaaggtgtagtctagtcgagattggcaatgacagcgtcaacaacttggtgtgtagtgctgtctccaccaagatctttagttctggagttgccctccgaaatgacacgcttgacagcagtctcaaggcggtcggcgaatgaaggaaactgaagatgcctgagcatcatggcggaggagagaagcagagcaacaggatttgccttcttctgctccaccatcttttcctttccgacatttccagccgaagcaccttgctcaaacacagcatgatcagccccaacgttccctgcagtgcaccaaccatttatttacttcttattcaatagaatgaacgattattattgcatttgtattcaattacctccgggcatgacaccagtgccaccggcaattccagctgccgtattagccactagatttccataaagattaggagtcacctgagataataacacgagaagagatttagattggaaagggaagggaagatgaatctatagtaaccaattaaactaactaaccataacatcgaactgctctggtttggagacaagttgcatgcagcaattatcgacaataatctcgttgtacttgataccagggtatttggttgctacttggcggcaagattcaaggaagagaccatctgcgagtttcatgatgttggctttatggacggcggtgacttgcttcctgttgtttaagtatgcatactcgaaggcatatttggcaatacgttcggagcagaacttggacataaccttgaggctctcgacgacgcctggaacgacctcgtgctcgagaccggagtactcaccctcggtgttctcgcgaatgacgacgatgtcgacgttgtggtggcgggtgggcaagccgggcaagttgaagcaattgacgagggaagcgtagagatcgaggtcctttctgagctgaacgttgagggagctcacacccccacccaccggagtcctcaaaccacccttcaagcacaccttgttcttccgtattgaatccagcacctcctccggaacacgcctcatgtccccgtgcacctcgtacttctcgaagtatatgggggcgtgcatcgcctccatcacctgctccaccgcctgagtcaccagaggcccaattccgtcccccggtatcagcgtcaccccccgcggcgttccgtcccccggtcgaggcatgtacgtcacgctccttcttatttccttcatcccctgctgcaccactgacgctgacattcttaatttacttcttacccccatctctctctctctctctcacacacacacacacacacagcagcctcggctcagaaaagaaaggaaaggagacgaattgactaatgataaacaaaaaccaaaggttctctctgcaatttgcactcatgcccctctcaagatattttttaaataaaagggatctctcattttgttttataaagtaaaacaggaattcttatgccacacagggaggggattaggttagggtaagggatcaaatcaaatgtcgtggattgtgaagaacagatactgggttctgaggcatggcaagagcattcccaacgagcgaggcatcatcgtttcctccatggtttgctttctcttaaattaaatcaagtccaatctaataatattattttcttagttattgaattgaatcgcattggcaggagaatgggactctccccgaattccaattggcctccgacggtgttcatcaggcccaactcgctgcacaatcattccaaaaggtacctcaactcaattttcaatttcaattaaccacgccaccctgactgcgctgcgcaggaactagaggccaataatatcccgcttgctaacgtacgcatttgctactcccccttttcaagaacaacccataccgctaacgttgttgcaactctcttgaatctcccttttgatggaccccactgtaaggtaagcccttccaacaacttgcctctttatttatccctcaatcgagtctcatttactaagcactaagcaggtcatccaagatcttcgagaacgctattttggtccttcttttgaactcctctcgcatgataaagtaagtcatgctcaatgcccactttgttctgctgcctactgttttgccaattcaccttaatttttaataaaataaaatctctttctctgcatctttttttgtcatagagatcttgtatgtttggaacattagtcaggttcaggttctaataaactctatcgttgtcactattctcacaccaactgtagtttgcaactcattgattacttctttccaatcttcaacagtaccaagagatttgggatatagatgaaaaagatccatttcttgggccagaaggaggggaaagtgtcaaggatgttgcttgtcgacttgcaactgcaatggccactatggaatcaggatttcaagggtaaagtcttttggtattctttgatttttcagcatgaatgtgtgcaagccctgcatcgtagttttgttttcaagttgagtaaattgattttgaacttttaaaacgtaattggaatgtgtatcgaaagtaatcccaaccatacattattggaaagtgcaaaaattgattttctaacggcaaaacaaacaggtacctagtaggtcttccaccagtggttgattgagatgttcttattttgttctttttattcatattctatcagctaatataattcggttccacatcttgcagatgtgcagttttggttgtcagccatggagatcccttgcaaatcttgcaaacaattctgcatgcagctaatgaacacaaggaacccacatataatgacttagcatcaatactgactgcagttcaggtggcaccaatcttgtcccagcaccgcaaacatgcactgcttactggagagctcagggcagtcatttgagatgtcagacccctatatgatttcatttcaaaatacaaacacctccccagtcatttttttaggaacagggatctaaattcgttttgctccctattccatttattactttatagattatttagcaaatacaatttcaatcaggaataacatgacatccgatagcaaataatcattatcacttacacgtcccattatgggagattctgtgtaattctcgattgaatatacgggctggcctgcaaattaaatggtccaaaagtttgtcctgtgtctgcatggcctgcagggtaatgagccattctgtggtccaaaattggtttttagaatcgtagtccgtgcgggctcagtctaagcagttggaccacgagcctcagcccacattccctgctttcttagtgatgtcttctttcacacacttttattagataatgatgtttagattgatgataaagaatgaaacaaaatgaattgaaacataatgggatagaatatgttggattaaaatagaatgaaacaggtgttattccattcgagcaaaaattgtgccttgtctatgttgggcattgtcctaggtgtatattcttagaggaggataatcttggactgttaactttaaggtttggttcccttcattctcaccaagaacttaggagtgattgtggagaatccatgatgaccttcaaaatcatgatggaataatgctcgttctagagcattatgaactttttgaacattataatactaagtcatttaagaagttattataatatttaaattaaatgttataaatataatacataaaaataatcaatagtttcaattgaactcaagtatatagtcttgtatactatgattacttaaatcgcaattaattaaattaagtaattaattcattttatgagaaagttttaaatttatttattatacttaaatcaattcaaacaaattaatacaatcttttttgtaaaacctatttgatttatttatatttcaaaacatcatataatagtcacttttaaactttgatgattattagtttaattaacttttaacactcaagcttcacatctttgtagttgtttttctttaaaaataaatatcattacatccaacgaaatatctctattgaaagcttataaattaaatataaaaaaaccacctcatgttgtactagacattgtctctattagtaaaccatacacacacatgataatgagaatttaatgttcattttgataataatattgctaatataaataaaattaaaatgtattactaatgaaacatatacatattttgatattaaattttaattaatatttaaagatttctattgaaaatattatatttatgtaaccttaatagatgaaaaaaatatataattaaataatatgaaatgaaaaaagattaaaaaaatagtgaaatgacaagttagttaaaagaaatgattgaaatgaattatggaaataaggaatagaaaagaattaaaaaaaaaaaaagttgaaaagaagaaaccgccagaggagttgcagtagtaaccgtgaggcaggtacataaggaaatgcggttccattggaaaaggctttgattgaattgaggaatgaagagggagtctgattgttcccggaagaagcagaagcggaagcggttaatggaggatgcaggagggtggaaggggaagacatcattatggtcagagtcagaggcacgaccctgcacggagtgcggcaagaagttctggtcttggaaggcactcttcggccacatgagatgccacccggagcgtcactggagagggatcaatcctccgcccaatgtggtgaggagacaacaacaaatgagccaggaagaccacgaggtcgctgcctgtctgctccagcttgccaactccaactccaacgccaaagcgagttgcaacaagcgctgtcactgggactcatcatcttccaattctctctctgtcctcactctcgatttgaggttcccactctagactacactctctttgctctccccctttatccctaacttctctcatttccttacctctacctacttttccaatttatgcaataatcgcatcgatctattcattctctctacattttagcatgcaaggacacttatacttttcctctctaattctttctttcttgacaaatagcatgtcggcttcattctctcctattatttatccttcacaacacaccatcttcattttctatttataaacatttatatctctatccatgattttaaaggcatttgttaagtctctttttactcattgtgaccacatgccaattacaattgcagtcatttcagctccattttcttgcaataatgaaactccaactgcgactattttaaaaccttgtgcgtctccttcgtagtacttacaaatatgaatctcctaataactagaacattaacaataattatcaattcaagatatgtggatgtaacctttgtagtttgtattgtaccatcgtcatttatgttcaagtttcatataatatttaatggatacctgagaagttggtctgcttatctcccaagtggaagtggaaatgaagttggacagcttctctaagagtatattttaaaagatcaaaaaatgtgcatgcccagcataaacgaccattcgtagtagtttaggggaaactaacagtagacttttcgaatggatcaatggatggatggaacgtacgagcctattattttctattgcctggcgaaatctcacattacttagtttcgtattaaaggtattctattcaactgtgaattattcctatcattctgcatcttattttcacaagtgcaattcagactatatttggattcacattaagggtgaaatacgagtatataatggaattaaaaaataaaaacaacaattaagtttcattatttaatttgtttaaaataaattaaaagaaatatgataaaaatgcattttgctccatttcatttattatttcttctttttcttccatcttaatttgaagggaatggaatgattttttttttttcatttcattataaaaatatctaaataataaaacaataactttatttggtttcattttttttaatgcaaaatcaatccaatgtaaaaaaaaatggtcaacacacgtcaactctttctttcatctcactttcactctatgcatgtctctttctatctgtcttcataagcaatatgaagcaacaaaaacttacacatgatcataattacattacaaacctttcgtaaattaaagaagtacattacaaatcattaaaagtcaagttagtcatacattatcaatgttgacatttgttagttacattaatgtagagtcacccatctctacttatgactagagaacgtttgagtttggaataggtgcaaaaacaatgataaagtgggcgtccacggtccaccccagtgactcactgatcaacaaccttcgtaaaggactaagtgtcacaaggacataatcatacatgtaaattaaagtattaatagtaaaaggatatatatgaatgactggttgcaaacgtgattatatatgttggtcaaggactgcaaaattgaagttaatcaaagtcacttgaagctagcccctagacttttccctcactcgccaaggattcaatttaccacacctctagggatatctagtcatatgcataccgtgagtttactattaatagagaaaaattaaataaagtaagaaaaaagaactagggagagcacataggccagacaaggaagatagactttgtatcataaaatgtgaaactttacgaagatgatcgaagtcttgaacgtttgttgaacaaatgaataatgaagagaaacgctcttggaggcaagcctggtctcttgagaatggaagaagtactgtgaacaaaagagggaaaccgaagaaaattaaaaattctgaaagaatttgaaatttgaaagattaaagtgcaacaaaaaaactgcaaattaaatagccctttttcaaagcaaatacaagatagggacttattaatattttcatcagtgtcattagttgttgcatatatatatatatatatatatatatatatatatatatatatatatataacgaataaaacaactcttaaatatgcgtcatagtgaagccagcctgaattaaaactcaagggttggacaccaataacagtgtcctacatgcccatgcccaactagcattaactgtcacccaacaattgaaaaggtaactcaaatcattataacaccgatgctcagatgaacaaaggtttattactacaccatgattaacaaaggttcaaattttaacatgattgaactaatgattcgattgtcaaagcaacaagagttctttactagaggttcagatgctacttaaagatcctagatgacaagtttgtcacgtttccttatcagcatgccaagtttggtggactcttgtttgaggtttacactattaggccaaattcagtatgatcaaacccaggatagttctaaccactcaaatcccttatagggccgggactcgggagacaaatttaaggcctaatacactattcaaagcctacatgcaccacatagtgcattttataattatatgttcaaaagcaaagtatcctcatcacttgttcacatacttcacgtacgtcaggtgtttcatgatatttttgttaaaagggctcactctctattaggattatcagatggctgatgagctcgaatggcattattattataactcacctgcatccgagaattataaataaagtatttttaatatcactagataaacattctattccatatattgtcatgttgttgatatacatactaacttaaatgttgtgtgtctttccaagtattcaaccttgcttccatgctagatcagtatcagtgtggtcactttcatcaacctagctaaaagacttgaggacatcatataaaaagctgaagcaatgaagttatttcattttgtccgtttatttattatcatatatatatatatataaactgaagcactgaagcaatgaaggatacgatatcatgaatagatcgtttcgaatctatagcccaaggaattccttggttttgaaggtataaacttgagcgtttgatttgataatatagatctgcttcaaatgtatttaattgttgtaaatattctacccgcttcatcttacgtccctcataatatgatggatttttcaattaattaaggaaaaaagattaaaaagtaattaaagaagggaaaaaatacaaatgaaatcaatcacgtagagcaggatttcttctcactaataaaatacaattacaaaggatcagatatctaatgcagatgcaatacggattcattaatatccatcgcgggacccattaaaatttctatatatatgggaaaattaaagaacaatgacatttgcatttaaaaagtgtcattcagatatttgagagaaattgaataaatattgtttgactttcaactcaattaaaaaaacagaggaaaagaaaaatgccattgattcaaatttcaggttcaagatcttaattacttgacgaaatatgagttgcttaataactaatacaactgagatcatttttttttgcgcatgaacaagctagtaatatccaagcttaaattatttgaactttttttataaaaaagattattgaaagtttccaaaaatccaaagaaaagataatagaagtggggcttcccttattggtagaatatatttatttcagggtggtgccattaaatcatgcattatgcatataataaattagtagaacttcatcagtttttatttaaattatagactatagaaatgagtctcacataaaattgtttcttgaccaaagcatgtatagactgggctcgattatttcatatacagcagcaccctttattaattaatgccgtcgaagatgataactgaagaagcgattaaagcaaacatctaatattaaataataacgggatttggaaaaattggtttgaatcaacggcgtatgttagtttatgggttggccagaggctactattctactgttatagctaatgaaaaagactatatatcaaacaataagatagagagaataaaagataattgttgataagatccctataagatatggaaatccataacatacatagcgaaactgtatctatgatttaatgcgagaatctaaagccttacgattgcctatctcgtaaccatgcatacttatattacttaattaagcagatccccttgacactgattgccggcatgctcaaatttagtttaatttggtttcctgttgatcagacatgttccattgcaatcaaaagtatttaaatactaaactaaaattgtgttaatgtcaaatctatagtttctagagcctaatatctctatttcgctacgagggaatttggaactcgaggaaaaacaactcaaggagaagatcccaaggaacctcgtaagcaccttccagtcgatctacaataaacttgccattattttaattttcttgcttttccacatggacatatattatatacggagaccataatcatgtatttcttggtaaaaaaaatagaagaaaggattgggaaagaaatagaaagatgttaaagttaatttatttagttttatggtcagtagatgttaaaagaaatatctcatcagagaagtaacatattgaaaaggaaaacgttttaagaggtgttataataaaaggttgtccttttattttaagatgcatgtttataaaaaaattaaaaaaaaaagtaaaggataaaaaataattatatataatatcctacatagtgttaatgttttaagtgtattataaaatggttgtgttgccctctctattaaaaaaaatgttatgttgtgtcaagttcaagtaccgattctaagcattagattggcattaatttcattcataattatatttttgatgagattatgaggcatattttgacattatatgtatcggaaaattcaagcttacttctatattaaccaatgagtagtatggaaaacattagttctgacaaaatagctccctgactgttcattgatatagcaagaaacatgtatacgttttcattgaaaagtgtcatgtatatactatataggaatgttaaagttaacagacttatgttaataacaggattaatatgtactttttgtatatttgaaaataaaatttaaattttatatttttcaaaaaaataatttgttagcaatatgaattaaaatagtatttatccaattaaataatgtgaaaattaccagaagaggaaaacaagtgggttgggtgtctaaatttcagttgtaatccacagcatctgactgggttctaacgtcagtgaagaaaaacgataggttacatgtcaaatcattgaaagatgcaagtggacgtgtcaatcgcaaaaagaatatcatcattaaacgtataccatgtggtccattattattattattattattattattattattattattattattattatggacttcaattagtttagattaaaaatattattaatgttgattattatgttctgataaaaataggaaaaagttatgggtgaaagacaaaattaaagagaaaattaaacaaaatagaaaaactaatagtttggataagtaatataatgaaaaagaaaaaaaaagcgaaatgaaaatgatatgaaacaaaaattaggtatacagatataataatctaatcagaaaacttggatacggatcatgcgtacattcaagagaagttatactgtagtgtgtaagaatgaaaaaaaatagagagaaaagacaacgaacattttgttgtatattttgttgatatttaaaaagattaatattttttaattttcttactgaaatatttttatttaaatatagaaaaaaattataaattaatttactacttattaaaaatgattttttttgtttgacttgatcaattagactagttctcactttatttttaacttggtcttaggtaattattctcattaaaaaatcttactagttttgttttcccaaattttaaaattttccttttttcatcttttaatttgatagtgtaaatattttatattattatttaattataaattgttatatatagtaaattaatttatttttataataattattgaggttttattttttatgattttttaaaaaaaattagatatgtctactatgttttgcaagattagctaaaataaaaataaaaaagctaaaaactgaaagttaaaaactaactaaaagttaatattaaaagcttgaaagtgaaaattgttatggtaacttattaatttataagcatttgataaaattatttattgaagtaagtgttgaatataaaatgacataaatacacatgtttgcattgtatttttatataaattttacttttgttattaaaaatatattttgaggtccttataattttttaattttaaactcttgtaatttatttatcaattacttttaattattattctatctagtctcaaatataagaaaaaaatatcagtgtatcttagtcttaaatgtttcatatcaagtttcaataaaggtagtttagaagaaaaaaaggtttatttttaattgtgattgacataacttaataaatttaactagttttcttaattttttttaaaaaattaactaattttcttaataaatatgagaatagttttattttattttttcttataattgagatagaatggagtgtatttttttatattgcatattttatattcatctaatgtaattatatatcttaaaatattttctatcaaatgtaaaataaatttaaaattttatacgttatttcaatatacatcatgtttttgttatattaattagtttaatagttaaaatattttgaagttaaaatttaatagaaaaatattataaataatataatgattaaaataaatagtataatatcaaaattatttcaaaaataaaataaaaaataaatttatcatctagtaatatcaggaagtatgatgcaaaaataataaaacaaatattgtaattagtataatgattaaaatagtgtaatataaaaatataaaaatattaataataaataaattaactcattatctatcattatcaatatgtacgtaataaaaagataaaataagaaaatcatatattacgtaaaaagataaaagataaaacctatcttatgagtgcaaaagttttaccttatatacagaaaagaataaaaaaatattattaaatattttaagaacaacgaaataattaatatgaaaactaaaagttagacattaatattttaaaaaagtattacttgcaagttaaaaaaaaaacattgtagacttttaaaataatttatttatcaaacattaataataagatcaaataaatttttaaatcgacaaaaaaagtttttaaaaaaagcctatgaaatgacgtgctaatcataactttcgttataaattgattttattttttcctacagtagtctaggaattagacttctaaaataagtgttattttagattattttataaaaattaaaagataaatgaaatagtatattaattttataaaattaattttattataaatattaaatgaaaaattaaaatagtatttattagaaatattaataaaaataattaagattacattaaaaagataatataatacttattttagaataatttttttctccatattccaaacttattttggaacagcagaaatacttgtttttgtttgaacttacccttatcgtaatttcctgaattatacttctaatagcatgtttggtttaaattcacttctaacgtaattattaaaaaatcacaataatagtgaagtaattaatagtttctttaactttttcaccatgtttatcataattttatgaaccaaaattaattcttatttatcgtccaaacacattactttaattattattttttattctctgaagcaaacaaagcatataagtcagccttgcattaaactttatcgcaattcaagaaagtgattcgcacgaaattattcattgtttagttatttttggttgtgatttgtgagtgtaaacagaaagacaccaactttgggaattcaattacgtgtcaagaatatattggagtatcaagtatcaacagtatacagtaatatccaccctctttcctccatcaatatcaaacatcaatcattatgattattatattattaaatactcttacgaatttcgactaatataaggttatgctttccgtttactatataataatactaacacttttaaaagtaaaattggttgaatgacacttttctatttaattataatcgatagatgtttttttaatacttattttattgtcatccaaatggagttaataaatatttaatgaatgtaaaatattattgtattttagactaaaatatctttatttaatactttaatctatcacgcatttacggttattaacgtgaaataaggatatatttgaagaaaaaaaaatattagattgtatttctaaaacataaattattttgtgataaaaaggtaaatatgcatatgaggaggtagtaaaaaaatatttaatatttatttaaataattaatataatttaatagtatgtcccaaaactaaggattaatgtattcatacaagatcacaaatatcaatccggattggaatcaatcttcctatagaaataatgaaaaagccaacaaaatttgcttaattgcataaatggccaatatttttgtaattatactaaatagtgtatcaatacttttactcaaacttactaagttttaaatctatcacaataagtacattttctttaatataaaacaaacaaatcctaaatcatatattattcaaatttcaagatagtaatttatattttcctataaataattttggaataaatcgagtcacgtgcgaatctacaaaacctattcatttctaaggaaaaatttaatggagaagatatattgcatattttcaaaatataaagactttttttaaagggttaatttgcattttctttctaatataatagagcaattttatattttaaaattaaaatatttaataacttcttattcgcatagataagtcttaaagtgagattatttttaaacaaaaaataatactaaacttatatattatgttatctatgatacacgtgttagtaaagtacatccagtttatgacaaactatttttgtttctcgccaaaatgaagaagcggctcaatcttttaaactctgtaactataattaaattttaggtaaaatatatttttaatttctgtattgtccttgaatttttaacttggtcaacttgatcctaagttttacaaaaagcagtagattttgtctctttttatagtatttgtaacgaatgataaaaatcactgttcttttaaagtacaagaactaaattgctcaaagttagtgagaactaatatcagttcaattttattcgattgtaggctaggttggctctacgcacatatactttaatttcaatgcgttaatactgtattttattattattatttttgtgtgtgttcttaatgtgctgtattcctgttgcactagttctcaattcatttttcaaatatatttttccttctctttatcatacaaatttttatattatttttaattcatcagaaattgaaagaagaagattcgtgggccgacctatttgttaaaagggatttctttgctccgttcactaattagtaattactgtacatgcgtaagcgcattaacaatgacccacctcgacaaaaagtaggctaagctttcttagtcttagttaaaaataaattcttttaataattgattgcgtcaacaattgattattaatattataactaattatattaaatcaaaattatatttaaacatattagggtgaaaagaaaatttaagaaaaaagttaaaatatgttttaattactatatgtaaatataattatgtttaatttttgtcctccgatttttctggttattataaacttttaattacttaaagaaaataataattgtataaaaaattatacaacaaagtgtacaatcaatgaaccaacagaaataaagagaaatactttaaattttaaatttaataaataagaaaatagtaaagatagaaaaaaatgatgttgtatagtaacttgttatatgaatttttgtatttgtatcacatctcttattgtaaaaaatttgtgttatgttaatttatcgggatattgtaaacaatagtaactccgatgaaatattgagattgatttaataaacacaaatacacattaattagtcacacacacatccactaaaagaaaataacttttagcaacaaatgaattgaaggttgacatttaaaaagtgatgagtcaagtactttttttttttttttatcagtgaaaaagatacaaagccaaagcacagaaaaacataactaaacaaactaattgcctctagggtacaagaggaccaaaacgcgaaaggttctaaactattcgactcaaactttgctagccagttagagtgatgagtcaagtacaacgattgataaattgttaatttagtcattcttatactttataataatatttcaatggataaatttatttcaattcattgtaggactaaaaatttccttttattttgtaaaaaaaagttttctttggtataagttatatataaaaaaatattattcaattttttatatatattattaaggcttaaatatgttttttaatttttaatatatacttgaattttgcattcgctccttaataatttttttcttcgcatttgctttctgatatttgaaaatttttattttaaatctctgccataagttaagtaatgacatgttcattagctattttgaaggataatttgtggtgtttttaaaactaacagtagttatttatagaatgaaattacaacttttggcggtatggtttaaaaaccaatagaatcaattaaagtaataaaaaaagctcacatgcaaaagaggccaccttcccttactagtgtggcaagttttgttcccttgagatttgtatcaacaaataaatctctatctagaaacaacctcatatgccaaggcttctcccttaccactatctccaacattgagcaaaactatctcgttgccgttgtccaagttcaatcatcggcatcgagtagaacctccccatcgacaccactcaggtttagtccaatgccaagatcatgatttttcgcctcgaaacctagatctaagacatcctccaccgaagattgtatcgctttgtcaccttgcatccaatatttaaattggttgttcaaccttttacattccctctaagtgtatttctcttacgtctattatggagttccccttggatgattgattggtcgctattaattgaaatgaaaacaatgctagagtgaaatactaatctatatgggtagcatatttggtagcagaagtaatttttatgatccagttgcccattttatgaatggagggatatggattaggccgaggaaggagtcattgccaaaaaaattatttgatttttactttcattgattttagcaatttttaattgtcagaaattgtaatttaaattttgaaatgaattatgatggtttctagagtagtcacaaatcgtcttatcaaatgtttaatggacatgtcatcatttaactaatagtatcaaaattgttcaaatatgaggagcaaatgcaaatattttttttttaagaaacaaacactaaatttgaacatatattagggatcaaaaatatatttaagcctattattaatatatgtcaaaattaacacaatatatattaaaaatggaaaaaaaaacatttcaacattcttgttcgaattgtacaaggtaatatgtatttttgatttaaaaaattatattgattaaatacataatatataaaattattaaaaagtgaaatacaaaatttcataattgacatatttatctatgatatgtatgtatcttaggatttagaagaagtaaaattgatatccattatgaatattaaattggtttgctttcattcttcatttttctttattataattttgagtaaattatgcatgtttcttttcatgtttaaggaaattatatattttttttttaacttacacatatttcccatgagatttaaggaaattacatatgtctttcttctgtttataaaacctacacaaactcttaaatgtcgtctaaatatttgacaataataattcatgtgcgttgataattttgattaaaaaagactaaaatatttttgttgtcctcattaatatgaaaatgttcagacttcgttactgcaaaacaatttatctatttttcgtactcacaaaatttaaatatgttatttttcccccgaaactaggttcgaatacatgtatgttgttgtaaaaggtgttaaaattttcaaattttttaaatcacttatatgtatacacaatgtaaaaaagttgaaatacaacactttttacaacgacatatatgtagatttagatgtaaaaaagttaaaaacctaacactttttatcataacatacacttaggttcgtatatattcaaacctagctctaagcgaaaaagtaacaaatttaagttgtgtgaggacaaaaataaacaaaaaaattaaacctagctctaagcgaaaaagtaacaaatttaagttgtgtgaggacaaaaataaacaaaaaaaattacagtcacaaattttgaacatttttatatttatggggacaaaaaatatatttgaatctttttttgtcataattgtcaatacatataacttgttattgtcaaatatttaaatgacatttaggaataggaagatttgggtaaattttaaaaacaaaaataagacatgtataattttcttaattaaacataaagagaaacatatatattttgtttaaatctaaaaaaaatatgtataatttattctataattttttatggtgatttgtaatagtaaattgatattcaatccttatcagaggcaaatatggttatgcagaataaagaataaccgagttctaatgtgtaaggatgacgagaatatgtttgacaagattttttttttaaggttatataaaaattatttctgatataattaattttaaaataattaaatttacttaaaatatatttaaattaacaataattatgaattatatttaaatactgtacatattttctatcaaaaacgtactgattattattttttgaacgataaaacgtagctttcgcaataacattgaaagaatgcgattacgaattactgcgagctaagaagttatccctgttgtatatcccgttggttgaaaagtaatttaaactctattgtccggctggtcttgttcgtacggtgacccatttcacgacacatgtcagaattatagatccttctccatatatgatttttatttattgtttttatacatgtaaaatttatttacaacgtcaacagttcaagctatagcaaaaagtactcagctcgtaggtggagacaatctcaatattatattccaaatgctagatttttttttcttctttcatgttacaatggacactgcttgctactgatcaattttatttttttattatatatatatatatatatatatatatatatatatatatatatataaaatgatcgcacaaagttagaatctattatttcatgtatattgttttaatctattattatataggttgatcctagcgagtttataattaaggtattttgaatctatgaaatgatttaaggaataaatataaatatattatttaatatgatggaggaaaaaaaagaaaaatgtcctaagtatcatttatgattaaaaatgtctctctaaggttacattttctgtttatcataaaaagtgtgagaaataaggttacgtttttttttttttttttttttagaaaaaagggcccaagcatccatgttgatggagctagccagccaggaattggagatgcatattacgtcaatgaattcaccaatgaaacagagaagaatctttttcaattttcgcggcctcaacttggacgttagaattaatatattatgacctttttttttaattaaaaaagaatctaagaattccgaatcgacgaatgaagcttaagtattgttgcgatccacttgtatgggtaaaattgaatgaagcataaatttgtttcggcgatgtggtgccactttacgcaatttcgcatctctggtttgctgtaggattggcatgtggcgcacaagcatggtcctctctctatatattctttttgttttggtcataagtaatggtgctgtagactgtagtgcagattcttcatcctaatgatctcccactattatacagccggtcatgcataattatatattaaatattatacatacaaagaggtgccactttagcttacttcaattcattaatggccagacagacatccctagcacccccacactcctgtcaatcattttttttttataacaagtaaggtacttgctttgagttttctttagataataaacaaggtacttttccatgtatttacggatattttatatttaagtaaattttaaaacaaaagtatttaaattggtaaataaaaaatgtcattattttatattcaatatgtgataaaattatgtatcttaaatacaataaactgcgaccaccaaacacattagttaattgatgtgaagttatttcaacttaataagagatcttgatgagttccagtattaaatatataattgtgctaaatagttaaataaatgattttattatttatagtatgtgatcctatttgactcgaatgtaattgagtctaataaaaaaatatctatgattgatctagacagaaaattacaataaattataataatgtattttcattactataacaaatatcttattttatattagtgttcatgttagaaaacacactttgaaattttttccaattaaaaagaatcaagaaaccttaatgaaatctattctacttaacttgagtgtgataatgagaatatatcacacctatttatatcatgtgttttctaatgattttgtcatcgttttctacttacatatatacaaggagtgatgggtatcacattactcctacgtaagtgtataggtgtgtatgaccccttactcacgtgataaaaaggttttaggatagcaaaattggtcctaagttctttgcattcatggcataatgattgtttgtcttgatctgggtcatctttaactctttaaggattcagccatatgcaaggattcaacccttaccttgtatcccagtctgtgtgtatctaactatagacactataattccttaagttttgagtttaaaagacatagacgcttgatatgattaatcaacttggtggaatagtccaattagatagaaatacataattaatgagataaaaaatatattaaaaagaaaattatgaaaacaattattcaaataaaacacaatttctatatctattaatttaatacgtgtccaattttttttaaaaaaactttatttcgattttatgtgaaatttaaaaatgaatttaagtaataaattttgaaaggaataaaaaaaaattaatacaggagaagttatgtgatttagcgaacatgatgaatcttaaaaaacctttattcaagtgaaggcttaaatttataatataagaatatattacataatatatttttctatgaaaaatatctttaacttataaaaaataataaactaattttttccttgaaaacttgtaaaattatatttaattttattactttttaagtaaaaaaatacttttttattttaaaaaaataatctcaaagaaacatacccagtaacttgaattcatctctatatgttgctttcatcatgagaatgacttgatcttattttattttaatttgctgggtgttgtttgtaatacaggaagcagagcatatagtatatagtatacatgaaggatataattgtataatttacagcagtgataagcaagggaaaaatatgtatatataaataaataccggacacggtgagagatgtgagactgagggggcactctctggtttttgcttaacggtgggtcctactgaaatagaagaaagaaagagtttccattccttttctggttattatataagaggcttgtcgatcggtcgcatgtcgagtggagctgagctgagttgaggtaatcatattttctcatcaagcaatcttaagtttaaggtgagttagcacttgatggctcctcctctttctgggtgattaaacttatataattaagtgttttatgaaatgtaaaatgataggataggatcgaggaagcatggagatggagtatggcgcgtttgggagctggtcggagtgtgaagaagagttgattgaggagttgctgggacaaggttgctgggtagaaacgagtgggagcagcgaggccatgcccatggggaagacatggtggattggaccaaaggctaatccagggccatcttcctccgtcaaagacagactagaggctgcgctggaatacttgagagaatacacaaacaacaacattcagatatgggttccactgcggaggagcacaggccatgaacatgggcctgggcctgggcatgggcctgatgagtcggcttcgattgcttttgaaaggaacatgaaggtgaagcttcggttctttagaagcaacgagtacccttatgagggatgtgtgggggttcctgtattggaaagagggagtgggagatgcctgggtgtcctccagattgaaatggaggatgaggtagttggagagatgatggaggtggtgaggtgtgtgtgcaaggcgcagaaggtgcctttggctctggcatgggctccatgcgtccaacagcaacaagccaagtcctgcggccattcaagggatgagaactacgtgtcgactgtggagagagcgtgctttgtgggggaagggcacccccacctcttgggcttccaggaggcctgctctcagcatcaccttttccgcggacaaggaattgttgggactgccttcgcaacagccaagccctgtttcgccaccgacataaccgccttctccaacgccgaatatcctctctctcaccacgccaccctctttgacttgcatgctgccgtcgctattcctctaactacttccactgcctcttttcatttcgtcttggagttcttccttccccgagacttccctgaccacaaccacttcctcaactctttatccattctccttcaccaagcttgcctcgctaccttccatcttgctctcatccaggatcatcatcatgtttctgcattcttgcccactgaatccccatctcaggcctcctgggttgcacacatggtggaggcccaggcccaggcccaacacaaaggtgtgtgcgtgtccttggaagaagaacccaaagaggagttcaaagtcaccacaactcactactgcaactgggacagtactgccaccagtacttatgaggcacatgaccaggtcgtgtttggggaagaatctcacactcacacacacacatttggtgggaagcgtggcagaaaaccaggcgagaagagacgaaccaaggccgagaagactatgagcttggccgttctaagacagtactttgcaggaagcctaaaagatgcggcaaagagcattggcggtgagagatatgatccattaataattgcattaattctttgtctctctctactctagctcttgtttaatgaatgaatgaatgcatgcatgcagtgtgtcccacaactctgaaaaggatatgcagacagcatggcataacgaggtggccttccaggaaaatcaagaaggtgggccactctttgaagaaacttcaacttgtgatcgattccgtgcagggtgccgagggtgccatacagatcggctcattctacaacagttttccggagttgagttctcaatcatccaagtccaacaacaactcatcttctcctacagcagcagcagcagcagcagtagcagcacaaagccctcaacaacccttgagagtgaaggctacttttgcggatgaaaaaatccgttttagcttgcaagcacattgggggttcacagaattgcagctggaaatcgcaaggcgcttcaacctaaacgatgtgagcaacggcagcaacgtggttctaaagtatttggatgatgacggggagtgggttgttttagcctgcgatggtgatcttgaggagtgtaaagacttgcatacaacatctcagagccgcacaattagactcgccctctttcaagcttctcctcttaatattctaccaaatacatttacttttccccacaccaccgctaccccttcttccaccctaggcgtttctttttagtactgtaccatcacatttgcattaatttctgctttgcttttacttgttagactcattttatttatatctattacttctacttaatttgttcttcaaattctaacattaccttatctacactttattcacaaagctccatattagttgctccatccaactatatatctatatataacccaaatttatattcatataaataaagtaatcccgctgcattagattgtttctctctcctaatacaaaggaaatgatgtggggttggaagggacttaagtcggctcttgaaactgtttgcggctcgatttcttaaagaataatgattcaataaactgaaaattttggaagggaattcaatttaatttttacatgattgccatagaatcattgctagtgtgtcgttaaacttcaacgttatgacatatttgattaagagatgctagcaatatattttcttatcacactctattaaatacatccttctttattattggttgattttattgaaaattacaagattttatgagacccacttaaagtataatttcatatttttcaacaaattttaatcaataataaaaagtatgttaaagattaaattttaatcaataataaagaatttataatttcaaatatattttacttaaactttatagttcttttaatccacgatttaattatacatttaatattaatatattacgttagtaaatcaagttgacctattcttatcccacatatcttatttggtcttcatcatgttagatttgggttcacgcataaatgatcctaacacaattttaggtaggctagtaacaaagatgagtatgtacgttgtgagtcctcattttcaccctaccaataatattattaaattatgaatattatgctatttttgattaatattacttaatatgttatgttaaaaaaataaaatataatattttatgaggattaaaatcaaaaatttgaattttatgaagattaaaatgaaactttaaattttatagaggctaaaactaaacttcaaagttttataaaaataaaaatatttttttaaaaataaaaatgaaaaagttatttgacacgtgacaatcatatcaatgtgctaaacatttgataaaaattatacattttcttaaaacaatattttgtattttgagggataaaatttgtttagggactaaaatcaaattttcaaatttttagatggacaaaattaatttgctataaatattttttgaaaaaataccaataaatatgatttaatttattatattaaacatttagttttatttttcagttaagttattttaatgaatatataataataataataataacatagtatgacaaaaaagagagaaatagatataaatgaaggatgtcaataagatgtatttatattatttgaatgttcaaatattttgattttataccgcatactaaaaaaataggtgaaaaaatgaaacacgtcatacattgcaaatagcttcactgactactttgttagagccatttattagaaatctgaatggaaagtgaattgttagttgatgattgttagaacacatgggtatgtttgttttaccgtttggccactcaaacaaatgttcggccttcatggaacgacatacatatttgtttagcaatttgaactacacttgagttgaatgtagatctcatcaaaatgagaccgttctcctcaaagcaaccacatatagttcctttttcgttcaacgtgtagtgatatcaatactaaagacaatttaacagcgccataacaaatttggtcacgtaatttttatcatgattaaagtaaaacaatcctatataagttgattttcttggtggtatcctcattgtttaagaatgataacagtagccaattaataataattaaaaagaaacaaaagtatatgaatatttataaacgtatatttgcttcaaatatcagcaaatgttctcggaattatatacacaccaacgtaactgatgatcaaacctaccaaacatcagaaattacaaaaaatcagcagagtttctccgtgaccatgttcagatacataagcaatgaactttctcgatctaaaagtcaaacgaaaagataatattaatcctctataatcaaagcaaattttcttgttcattaagtatgtgatcacgtagttaaaatctaactttcatctaattagaggctgttctgatgaagcagaaggcatgtcttctagctgctccttaatgactgtatatcttaacggaggaccaaacaagctcaaaaccacctgaaaaaaaagggcaggaaatgtgagatgttttctaattagttattgtgcacgtatattttttgggaataaaaaggtatagtgtagaatcccgacgaatcacactagaaagagagatccgaaaactgtataggtatgtgactgtacaattgaagatgacttaaaaaaattaattggtactatctataccaacaagatgcatctatttttcggtaacccatcacttaagaatttcatagttaagcgtgcttcacttggagtagtaatgagatgagtgattttctgggaaattttccaaaaagcatgtgaatgaggacaaaacacactgaaaaatcttgtattggtttgtgggatcagtcattgatcttagaaataaacagaactcattttcgaggtcttggaaatggctacctacggagggttctgattaacaaggatgttgagtgaagtaccgtaatgtgagagtcgccgaaaaatcgaacatcagggatgttacatataggggaaaggtaggctgtcctatataaggtcaaaacataccacaagcctcagcaagggcttacagtggtgctaaatattaacagattgtccaccaaagaggattgctggcagtaggaattgaacataagccgtataggtaaagtgctttcattcctaccggcagaactaatcccagtggggattgtatggattaatgacaatgtcaaacgtgtaaggcttgttgaacacattgtgaaattgaatgccaagtgtgaccaacaattaaaactcgcaaaatggaatcgaagcaaaacctatttcctgacgttaatgaaaagctagttatttatactttatagagcaacaccaaacaccacaaacttacaggtagaaacacaagaccgtgtaagaagccaatgagaaccaaggccagatacatctggaagtaatacacctgcaaagacccaaaaggtactttaacatttcttgagcagacaatcaagtttggagccaagggtgatatgtcacataccacaaaaatttctgatgttgagaagcaaaggacgaggactccaactaattttgtaagtgtgattccactaccaaacaaagataaataatacaaaaagaaagtgtcaacaaaataatagtgcaggcagacactaataattcaaccacgattcaaatcatttttgtaattagttataaatggtatacctgcatcaattctctgacaacagatcaagagttatatcaaagctacactactaaataactactataagatgaacttttaatcatgcgcataacatttcatctttgctgaacctttagggttaagacgaggaaaaggggaaagaacaaatgatggcaaacaatgtattttgagattgataataagatgtcacacacaaatacaaatgcacctatttataccattaaaaagaccgagttttagaactaccagtacaagcccaaaccctagcctaggcccaccactaacaaccttcatatcttttaatattctccctcaagcttatgcttatgttacaagttgatgcacaaattcgatacgcatccaatacggtggttactgtggttcaattattttaaaacatataggatacgatacatgtaaaaatacatatttagatacatacgaaaattacgtgatctaatccaaaaacttagaaactagtgcctccctcaataacaaaacactggcaacatccaccttagtggccctgtcaacctataaacttgtttccaaaataataactatcataccaccgagtaagtggcctctaactgggtttatagtatataccacccaggaacacaaacaaggtcctcacctagaacatcatatgggtaggcattgtcaaccggaagtcctcaagttttgtcactctagtgatatggtcaaaatagtgtatataattagggggtaatccactaactgatagcaacgctgctattacagagaacaccagcagaccaacgaggaccatcaagaggtcaacacacctcagtgactacaagtaataccagcccagataaagacaaagcaactgaatattctcactgcctcatccacaaattcagcatctaattctgttattttctattgcaaaggggccctgattggccacagcagatcctctgcatgtatttatctttaaataccattcagtgaatgagaataagcagagacttattatcctatttactccatttatttccttacattagaactgtagcctaacactaaccctcaccttacaacctggttttgagatagaattaggcccaaactcaaaattctaagatggtacaagagtctatccttattccattattgggtcacctaccatattatccacccatcaaacccaattctaacatggtaacagagcctatagtgtaaacctaaattttaaaatggtatgagaacctatcctagcgattgttgttggatttatcgggctgttattggaccacccatagatgtccagtcctttgaacttcatgttcaagatgtccagtcctctgcgtaacagggggtgttaaagatcccactgaccagtgatatggccaaaaataatgcacatagtggggtggggaggggtggggtaaggctacaaatattacaatccatgatctttccaaatgccacaatacatatagtcaacctgaatacggaagcccccatggtacacaatgctgtctttgctcgttggctcctatcccccaagcttacctgtgaacacatgtatacaagatcatcagaaaatgtgcatacagcatagtcaccaaaaggcaggtggttcaattgcataaaaggtctccctgaataaatcagtgtgtcaatatttccctggtgacaaagcagattgaatttcacatgttataggaattataaagtgacacattgacaaatatcactgtttcctcaaaaagaccaccataccatatgggaagacccgtcaattcatagagcagagaatcagactaaccatgaaagcatgtactatatgcacacagaactccacagcaattcctattgacataataaggtttacaacagacaccgcattgagttgaatacccaaaattgccattacaccctgcaggagtcacaaagttcatttgtttcattctgtaactaagaggtaataaataggatattgaaagggaaagcaaatgaaagatgaaacgaatttgcaactgtaagataaatgttaccatgagatccaaaattatcatgatcagaacaagtaataagattattgaactccacacgctgcatttaatagcaaacagaaaaagaatattatgcttaatcttgaactggagagaacaaattttcaagttgactgtaaatatacaaggctcaagtatacctggatgtgatgataagacagacaacaaaaatagcacctgttgtatcaccataagttatttaatgacaaacgaatttgactaaagaaagacacagacttgatatgatacattttcacacaagtagtagttgaagaatttatgtccgagaaatggaaaacaaaacatggaaaaaagtgagaagacacgaattagattttcactttccaattttggtccaatcagaaatatcaagagggaggcaaataagtacaacccatgaatatgtagtctaaatcccgatactgaaatctttcatacataaaaagcaacagaagatcctatatatctttcaagtggaaaacataaagtggtttgatgttgataaggcaacagagtactccatcaaagaccatagagatagaatttaaaagtttgaagccaagaacacaagtataaatcttctcaataaaggcttaaatttcaacatataaactgcaaacaggaagggaaactgaaggatcataacagacagtccagcttatacaacaaggttgacaaacgagtatctcatactgtgtgcatgtgttatttaaactgttttggaataccaacctagtgctatgctaatgttgatcagggctaacttccatatatccaggtattgttcaaagaagatataaaacactgagtacggaaaaatatccatctgcacaagagaaacttaatcaacaagaagtggtgatccacaaaagaatcaacaatatgagacattgtatgattttagtcattacaaaatgcttcataaggatgagaaaatggtaagtagatccataatcatatcatctaatattttgttataaacttaataccaacaaagagacagtcagataaaaagtgatgagctaataccaacagagattgagactcaaaggtcaagtgaaaacaaggactcccaaataaaatattagattggtgaaagacagaaataacacaataacaataatagcagtaatagtagagtcaatcctaggaaaaggttcataaatgcagttcaaataaaaaataataattacaaggagaaaaaatatgtgtagaccatattccgaacattttttgatccagaatgccaaaacaactcagtaaaaatgcataatgccattgacgtccaaacctttaaagatgaagaaattcttgccgagaagtcccttgcagctcgtattgcattaacatagtcaccctaacaagattttcattagaacaaacagagaaatgtatgaaaaaaatatgccaaagcaaagaaaataagatcatcacttattatcacactgcatacttgtctattaactggtgtgtgataagtacggaactcagaagcttggatgacaccaccctcataacctgaaatccagttataagcaaaatctacatattagattttcaattttgagaatgttacagcaaatataaatataagttttgtctttttataaagagggagtgagtatttttcaaaccattcagatctacactgttggtgtaagctccatgaccaccctttgcacaatcagctgatggcagtgcatcaagaaaccagggaagcttctctctgaactgtgctgtagatggacgatcattaaccaaatccgagtggcggaaacactaggaatcaaccaaaagtgtcagtcgctttactaattcacccttttgatttacagtcacatctattaggaaagtagtgtcctatgtaataaacaaaaaagtttagagggagaagtatattactgttgtacagtctttacacactccacccaacccacatggcccttcatctggtaaacagcaaggcggctgaacaaggacagacatttactattgtaaacgaaaaatatacgatggtacattgagcaatatttaattagatttatcatttatacaattgatgtagatacaaaaacaaggcaggagaaaagagaaaccatatatacatatacaatgtgcatgaatataagttcaaaacatgtaggagagaaggaaagttgagcatgcagcatgcaaatattatccaaggacatttaaagaagcacatacctgatcatcaggtggacaataagaatcatttgtgaattttcgacagcaactaaaagcttcaggtgatatccatacaagaaaatcatcaagccatgaggcagctggtttggctatgtagcttgatgttggcactaatgatgctctagatatctgcaatgttacagaacaatatatacagaatccattcatatatgccaagataaaaaagaaattacattacaagtgtagttatgtacaagtcagccattcaacaatataaatgaagaatataattattgtaattaatagggtttatttctttcataagttagcctgtacagtttcttagactctaccaacaagtcgtatgtccgagtggtcctgggctcggtccccttaagcaaggtctcgggtttgagccttgtggatgaaaaaaatgtggttgggaggggagatcctactaaaggtggtcagttaggttctccggcggagattaatcattagtaaaactagtggatactctgcatcaatgttatggtgataaaaaaaaaagatttttatactcttgagtgttggacatttttttagtcccttgaaattcttgaattaaaagtaacgtagtctatatatagaagtggtaatcatcctttgtaataagctgaataagaaataaacttcagccactgtaagagtaagtatactctatactcttatagccactttctttttcaaatcttttaggtttatcaagtaggtatcagactcttgatgcatcaaaagactagcttccttcttgcagctatcttaggtagctttcattttcaccttggcaccttcattgtgcccacagcccagaaaatgctaccattatccaccactgccattgctggaatttttttttttccagcaggtttctccagcaaagcggacgtcgctgatggggacccaaagttttagctctcatcagatctgccatgttcccttacgcacgcaaccagtagccatgcatttcaggtgtgtgtacaccacttgccaccgccaccacagaacaggacaccggccactccctgttatgtttcaggatttgatttgtcctaatactgcctcttttgcagctgttagaaagcaccatcttctcattttttttggctgtgattgaaaatatgttttccctttttgttttttttaacatgtctgatgaaaaacaacttctctatagtctcttaggcccaaagatttaccagtgttgcaaggaagggtcttaccatcttcatgagcaaaactaccttcagtgtgagcacagctagtttgcaccatgataaattcattttttatgaatttatgtgcatgatttcaaaggaaaaattgaacaaaaataaaccataaaagaatatttttttttggaaaacccataaaaattagattagttttagtttagagatatttccttttgtagatatgactttcatgaggagtttccttaattttttaggaaaataaagcaaaacacttgcaatttgggtacagcgatcacacatgaagaaaacaggaatgctagattgtaaaccatttgatacccaaacgaccaaaatatgaagcttcttcctaatcagggggagccttattagccagttcttgaactaatgtcattggaatgcagttgtttggactaaggtacattaaggggtgacaaggaaagggcctagtttatatggctaggggtcacaaatattatactatacttggatgccaagtgggcaaaagatgtcagtgacaaatgttccattcaatttcaggctattgtgttcttatgagaggaatcatctcatggaagagtaagaagcagaatgttgtggctagattgtagagtattgcaccatgactcaccccacatgtgaacttctatggctaaaacacttgcttcaagacttgcaagttttaagagtttggtcttaggagcttgtttgtgataatctgccctatatctcattaaatctagttttttcacgagaagacaacataagttgtttgccactttatagagagaagatactttttggcattatcaatacctctatgagctccaaagatcatctggctgacattttaccaagtcttcaagaggtcctagaattacatatatatgacatggcttggggggattatatttattttatttctgtatttgatatttttttcctaagattggttagatattattgatgtaatctcagtcaatctcttagtcttagagttctttgtttccagtatttactatcatttacacacttccttcactgagttttctctcaagcaatcaataaaatattcagtttttactagaactaatgaatggaggttgacactaataatcacttgttgaagaacttgaccattgaattacctcatttaaaagagaatttgaatcacagtggctaatggagcatagctggtttgtgtgtttggattccaaactgcacaagagactcacaggaaataagttcaaaagttcagataatacacttaattgatacatctataagagatttttaacgtgcaagcacagtggaggaaaataatgatatacaaaattttctttccactaattctatttccttttttattcaacagcagcttgcatgcctaatgcatcatttcagtttgtaaataacacaacattgaattgtcttcttaaaagacccatcaattaatagagataagtacgctaagaacaataaaattaatcaacctgtagttgtaatcctttacaacaaaatataagggtggtccaactctaaggtactcagatatgttactgaaataaccctgaaagaaaaaatgaatgtaagaggctggctagtacaaaatggaacatgggaaaacaaatagaaacttaaacctgaaggtaggaatcccgtggaagagcaatctgttgctcaagaccaggttcaatccttgtgcataatgcctgtcaaaataaaaggaaacaataaaagcacaaatagaatgacatttccgaaaagggtcttactgaaaattaatattttctcgtttcccaagaaacttacaatgcttgctaaggtaaatgcagcaaatacggcaatgaccaagattttaactccccatagtccaagaaatggtgcatgaacctcctaaattcacacgatgatagtagagttaattttgatcagaaaagtgatagcctgataggaacacaagatggaaataaagagtgaatttttctggattgaaactgaacagaacaaggaaaagtaattcttgtccaagggctgcttccctttcacaaaggataattcctttcttacaaatcttcaaattctttgaatgccccttcgaatcttattctcccttatttatatgattaatcccctctaactaactaactaactagtcctgatagggcagctatcataattattggaatattacaattcacgatttgaatcatgtgattcagctagctagcaatttgtatcataagatgaatctcaaatgaatatgaatcttattatccattaacgaattggtgcaataatcacacgagtcaatgttcattatttatccttccttttctttcaccaattctcatgaaagaaatcgaagagcatataagcttaaattgataaatgaaaaggaattgaaggatagcttatcttatggattattgcactactctatttgtcactcactcattcaatgcatgcactctaattggttgtttcatttcttcaattccatcttccaaaatagaggtttcatatactcatatataacttataattttgtttcacgagactaatgattaagttgttttatctattttgaatataaaattattacatttaagttctaacactatatattatctatgttgtaaatatgtaaataatttaggatttctctttcacaaatgatttctctttttcttacaaatgttctaactaactgaatgcccattccatccaaattcccccctatttatctagctaatccactctaacaatgtaaaagttatatggcgttatgttgagaattttttgcctatgaccgccaaataaaattagaaaacaacaaaattgaattcataaaacatgggtaatacaataaaaatcattttttagtttacacataatcaactcatgaactaaatataactttaccttcatatatcgtgtcagtaatccatctctttcccgcctaacacctacactttgattaggatatgattagaaccatatataagcaaggagagagaaaaagtttaaaatacaaagtacctacagaagctgaaaataattcatgattatgcttcaatggaaatgttagatataaactgtgtgaatgtgtttaatctacaaggtggagacttaagagtgattttatatccttaacatgtttgatgtttcattatgtgagagtcctttcaagttgaagcattgacaaatcacataacattcatacgtagtgctgaaattaaatctcaacaagccaaaaaaggacaacaaggatcaaatttataaccactacatggagcctttgatatcatgtcaaagaccaacccgatcctaaaagcttaaggcttattagatagagtaacaagaatgatttataagtccaagtaaacccctcatgcaaacgagctttgggcttgaagcgtagacaaagcaaaagggcccatcatagatgcataagaataggagcataaatgatcaacttattgacaacatggtcataaaggctataccaatttgaaaccctaatacccaaaagcctaaactgtaagatgcaggcttagcagaaaaccaatgtatacatgccataactcagatgtaccttcattttgctccgcagagggcggattcaacttcacgcatggaaagcaatcaatcctattatccttggccctcataaagtctaatgtaaccaaagctacaaaagcagtaatctgtagaaggaagtccagtagaaccgccaaagctataaaaaagaaaattcaggagttaagaaatcttaaaaccactttttaaaggagttgtatatttcaccctcctttttatgtgtatagatgatgtcgattcagttttctttttgtccaaagtacagggtgagaggagaaaaatctgtaacctgcaatcatggagaaaacacgacatgctggcatagaaacaaatgatcctacagcaaatgctagaatctctgataagctggccagtgttattgaaggtccaacttcacccattgcattgcttatttgttcctctacaggtaaacctgagggttgccgtttcacagcatctacgattatacacatgttatcaacaccaacctgatcaaaaaaatgaaaatccaaaaaaaacaaaaagtgaaatctaaccacacttgcagaaaagtaagcagggcaggagagttataaaaattaataaaacttgaatgtagagaatggcccaaatttagaagaaaggttctgaattatctttagcagtcagcatatatgatacttatatacatcaagagagtatttacaagacaaaaaaaaatgaatttaagctatttcctatggcactattgctcaaaggacatgaaccaaatataacaattcttaatgtttactttccaacattctaataattataataacatttgttatcttagcgattgttgttgggcctatcatgccaattgctattagtctgttatcacttatcagaacatccgcagatgtccagtcttgcaaacttcacgctcaagatgtctagtccttggcatgagcggtgtgtgttggagatcctacatcgactagtgaaacgacgaaattaaagtatataagtggtggacatccctcaccttacaagccagattggtagtgttgagttaggcccaaactcaaattctaagaacattatattacttgctctaaagttgttgcataagagtcatgcaacaagcttgtttcatacataattaactcaaggacttcaaagaattttggtgaaaatgttaacagctccaggatggctcttctccctcacaaaatgaaaatcaacctaaatgtgttttattctttcatgaaaccttggatttgaagctttatgcagggaagctagattatcacacacaagcttcatgaattgctctttacaaacacctaactccttaagaaactattttagccatacgagttcacgcattgcaactgccattgcttgatgtcagcttcttctttcccaagatatcagattacatccaaaatgaaagcagtatcttgaggaagaatgcctaaaggagaatctgccggatcagcatcatcatagtcatagagtaaccatcttcctatagctcttttatgtatctaagacctgaacagtggcatcctagtacgagtcacatgtacatcaaaagaaatatttgaactagttattgggagaaagttcagttacccaatcattcttcaatattatttaggatctggtaatggcttcctctatcttggtaaaagctttatgctgggagccatgagtctattgacatgcttacacttggtcatgccagcctcctctagaatatccaaggcatatttcctctaggaaatccacattgtgcaacttctatacccagagaaaagcttgccaacatccttaaactgaaaaggcttgaacaaattctgcttcgagcattcaatatcatcctaatatttattggtgatgataatgtcctctatatagacaagttaaatgtattgaccaagagattggcattgttaggaaatggaataattggcttcacttctagtcatgccaaaggcttgtaatacaatactaaaacatccagaccaagtgcaaggacattgcttttgaccatatacaaatttgcaaagcatgtaaacttaggccaaactcctgctgagcaataaaaccaatgggtagttccatgtgtacttcctcctataaatctccattaagaaagctattcttgatgtcaagttgttaaggaggccaacaaaaatgacatccacggttagaaataaaagaacataagcaattttttgacaccaaagagaaagtgtcaatgtaaccaaggaaataagtctggaaatagcctttagccaccaaatgagttttcaaacgatcaacaaaatcgttgaggcccactttcattgcaaacactcaacaaaagaaattatttggtggttatgaaatcaaatattgtgtggcattatattgtaggacagacatctcatcaacctttgtttagtgtttagccagtgattgagtgaattttcatttccaaagatgttattttcaatgaaaatcagtttccttatccttctctcttttcctctcctacttccagttctacacctactgagttcatttaaccaccttacctgtcattgagtcagtttctcatcctccgctcaattctaatccttcttcctcatcctctcctgaggctccccactcttcaccttctgttgaggcttccaggtctgataatgttgtctcctgaccttatgatcctgcacagtctcccatttggcttcttctgcctctgttcatactgatacagtgctgtctgatgaccctcttcagttgtctccaactgaatctcccaatactccacaacctgctcatgtcagaccagacaatgtgcatcctatggttacaacagccaaagctgacatagtgcagccaagaattcatccttccttgcttcttgttcatactgaagccaagtcagttaaacaagctctgagatacaaagtggtttgctgctatgactttgttgaagtttgggttcactgacagtaaatgtgacccttctttattcatttacaagacttcctctaccactacctacattttagtatatgtagatgatattattatcactggaaattcatttacactcatgcaaaagttaattcagcaactcaatgcttcattttctctcaagcagctgggctctttagactattttttggggattgaggttcattcattatccagtggagcacttttgatgactcagtccaagtacattcgagatctgttacagaaaaccaatatgctagaagcaaagcccatttcttctcctatgaactctagctgcaggctctccaacatggttctgatttactgcaagatccctccttttacagatcagttgttggagccttgcaaaatgttacaaaatcactcgtcctgaactcagtttttctgttaacaaagtatgtcagtttatggcttctcttgagtctcactggactgctgtgaaaaggattttgaggtaccttaaaggtacccttcattctggagttattctgtatcctgcctctcttaataaccatctttctcttagaggctattgtgactttgactgggcttcagacccagatgacagaagatctacatctggtgcagctgtctttgttggtcctaacctggtgtcttggtgatcaagaaagcaaaaggtggtttctaggtccagtactgaagcagaatatagaagtttagctgctgccacagctgatattctctggattcagactcttctccaggaacttgcagtcccttattctacacctatcatgctgtgtgacaattccagtgcagtgcagctagctcataatccagttctccatgcttggatgtgatttttgtccgaaaaaaggttcttactaagcagctggtggttcagcatataccaggcccagaccaatgggcagattaacttaccaagcctttgtcttctactaggttcacatatttgagctccaaactcaatgtagatgagctacctttggtttctcagctccattgagtttgcggggggtgtaagtgtaaataataataactaaccttagtttttctactgtagttagttaactgttagccttagtcagttgacagtcataactgaatctcagcagtataaatactgttcttgtaagagatttcagtggctttgtattttcttcttctgtctataatacaaccaaacaggcacttagtccattcaacttgcataatacttacataagataaatatggtatctctgatggcagttcataaaattatcttggtaatgataaaaacaaagacttacagctaaaaccagaaaaggtatgacttccattatgattagtgtcgattttactccaatagcactgaaaaatccaactgatccaaggacagaaagcataactagcaaaacccccaaaagaccaagcaatacctggataacatcaagttgaagaatgagaagtattagagtaaatagccagagttgaagaggctacccataacatttgaaaaagttaaaattaatttctatcatatctgcatcaaccacatgagaaaagaattggaaaaaaaaaaataatccagttgtgataagcatgaaaacctacacaagaattcaagatagaatgtacattataggtcttctcattaattatggtaaaaaatggtcaacaacttaaacctggtccatattagagtagaaaagggaattctactcttctactctaatagtccaatattactatcagcctttgtctcccatcttacaccactaatgacacaggaaacagaaaacccctttgaaacttaaagctttaggcactaaagtaaattgttaccgaatcttcaaattgaaaagtgaactgctctcacaaataatgaagctcccttgaaggctcacataatggaaccaaaccaaaacagctctgacaccaacaaatgaacttaagatcttgagagaaatcagagagatcatagagaggatatagtttgagagaagtaagatgtaagatccatgagaaactattgaaatgtgaatactctttttcattcattcagattgaaacccaaagggttcattatatacaactagttctaatactctagaatattccaccacttattctaatactctagaatattccacaactaattctaatactctagaatattccacaactaattctaatactctagaatattccacaactatttctaatactctagaatattctacactccccttcaagttgggagatatatattaatcatacccaacttgctaatcaaatcctcaaaggtgggcttgtgtaatcctttggtaagaatatccgttgtctgctctttggtaggtatatatgacaaacatacactaccatcctccaatttttctttgataaaatgacgatcaacctccacatatttagttctatcatggtgaattggattttgagcaatactgacagcagccttattatcacaatacaatctgacaggtagggaataagagatcttcaattcctcaagaagtctttttaaccagattccttcacaaatatcatggtctagagcccaaaattctgcttgtgcactgcttctggcaacaactgtttgtttcttacttctcctggtcacaagatttccccagacataggtacaataccctgaagtggatcttctgtccattgccgagccagcccaatttgcatatgtatagatttcaatcaacctcttgtgtcctctttgaaagaacattcctcgaccaggggtgtttttgaggtacttgaggattctataaattgcactaaggtgtttttacttaggagaatgcatgaattgactaaccatgctaaccgcaaatgcaatatctggccaagtgtgagataagtagatcaacttccccaccaacctctggtactgctctatgtcaacttctttcccatcttcaattcccaatttaatattaggatcaattggagtctctgatggcttgcacccaagcattcctgtttcttgcaacaggtctagaatatatttcttctgagttaaagaaatttctgccttactacgagcaacctccatgccaaggaaatatttgagaactccaagatctttcagttcaaactagtcagctaaactgcttcaaagagcttatctcctcacaatcattttctgtgacaattatgtcatcaacataaataatgagaatagtaattttgccaccatcatagtgtttataaaatagagtgtgatcagtctgagcttggaggaatcctcttcccttcacagcttgggtaaacttctcaaaccactctctaggggattgtttaaacccatagagagacttcttcaacttgcatactgaaccgtctcctttttcaaaaccagatggtggatccatataaacttcatgtaaatctccattcaaaaagacattctttacatttaattgttgcaagggccaatcaaggttggcagcaaatgatagtagaactcgaatagtgttaagtttggcaactggggcaaatgtctcttgatagtctatcccatgagtctgagtgaatcccttagcaaccaatctcgccttatacttgttgatgctattatctgcattaaattttattgtgaacacccacttgcaacctactattttctttcctctgggtaatgctacagattcccaagttccatttttttttagtgcatccatttcttcaaaaactgcattcctccattttgggtcatcaagtgcttcttggatgttttttggtatttttgtattgtctaaaatagtgttgaaagcacgaaaacctggggataacttttcattcgagatatgataagaaatagggtgagcagtacaggatctggtaccttttcgaagagcacatcgaatagacttaggatcgagcttggacctttgaatgggaggaacatgtacaaaagccacacagccaaacaacttgagaggaagggaagaatgagccccaaaaaaaggaaaggtgtcggtaagacaagataaaggggaatgaaaatttaggacacgagaaggcatccgattgatgagatatgatgcatgcaagacagcttccccccatagatatttagggatatgcatggtaaacaaaagagctcgagcaacttcaagaagatgtctattttttctttcaaccatcccattttgttgaggggtgttaggacaagaactttgatggagaataccatgttggttgagatagtatccaagaacagaattaaaatattcagtaccattgtcagttcgaagaattttgatagaggtctggaattgagtttgaatagcatggaagtttttaaaggtggatgcagcatcagacttatcctttaaaagatatactcaacataccctagaatgatcatcaataaaagtaataaaccaatgagcaccagagatatttttctcatgggctgggccctatatatcactatgaatcaaggtaaatggagaagaatcatgacgaactctaggaggataagaaacacgaggatgctttgcaaactgacaaatatcacaagaaaaagaactggattttttattgataaataagtttgggagcaacttctgaagataaaagaaatttgggtgtcctaaccgacgatgccacaacaaaacatcattacaatcatcagacaaagataatgagtggtgcgcaaaaaaatttgtttcattaggatccttttcaaaatagtaaagcccttcttcctctctagcactgtcaattttcaatcccgaatcctgttccagaaaaacacaagcatggaccgagaacatcgcaacacaatttaatcagatgtaagtttgctgatagagatgaggttacaagtaagagagggaacatgaaggactgagttcaaagtaatgtgttcagaaagtttaatgaatccctatccagcaatagtagagaagctgtcatcggctgttcttattcgtggcagttaatagtaaggggtataagaacaaaacaaggttgcattacctgtcatatgattagaagcctctgaatcgagaatccaacgattactaccattaacatggaatgtcgtaccttgttgagcaacaccttgttgagcaacacaactagttgcttcaacaaattgagacatcaccttctgaaattgctcatacccagccttggagatgaaaacaccatcaaaattaggagaggcacgaaactcctcactcgtattattagaagagtccataagtcacctcaaaccaaaagagggtagggcttttttttaaaaaaaaaaaaaataggcttcagagttgcacaacgataacaggaaaacctgctcttgataccattttgaaatgtgaatactctttttcattcattcaaattgaaacccaaagggttcattatatacaactagttctaatactctagaatattccaccacttattctaatactctagaatattccacaactaattataatactctagaatattccacaactaattctaatactctagaatattctacataaacacaaaatttaaagaaaatactatggactctgtcaaaaacaaatggcaacctaagatgaacctaagtctccatacttgaacaaacaacatgatagcaaacgagaatatttacaatgatcaactagtaaatccaaattccaaaataaactccccatgtcataaaccaactattgcaaaagctaaatttattagatgaaaacgtgaaaattttatattacatctctaacatgcctacttatgcaagaacctttagggattaaagtgtacacatgcagaggctcacctacctttagctgaaatttaactttttattagaagaagtagggcagcaaggaacctctacatcactcaatcatagatgctcagataccatgtcatgaaccaattatcccaaaatcttaagttattaggtgaagacatgtggctgttttatattacatctctttatattacatctctaacaccccaccacaatgataacaaatgtcaaaacatgcaaattgtttcctcgtcaactctgtgatcctttgcatttattattattaatgttggaaataggagcattaaatgataattattcttccatgtagtttagttattgcatttagcttagttgaattatcttaggaagtagttctcttgataatagcagttatttattatctttttaatcacaattattataaatagatcactctgctaagtaaaattcagaaaataaaatgtgtttctctattctcattcttttttctctcatctcataattaatggtctacacttcaactctactgtgtagtttagatgcttggaatccccatgagcattagttaagaacattaacattaagaagtacaatttagcacgtattggcacttatattatgcatgtaagtttttacttttgaatatacacaaacaatttagtgtcacagggtatactagatgggatcatgggaaaaggacaattgaaagcttcaaggaaaataacataccttggacgagaggaagaaagaagatggatgaggtggtctatctcccaaggtcaccgatatataagcaaacattacaatatagctcacctaataatatgttggagaagacatttattgtatattccaataaagcacatcgttatgaagccacaaccaaactaatcagtccattagcttacacacaacacaaatcatgttttcacattcagttgaaagaaacagaaatttcttacaagtattgttatgacatctgcagtgctttctctctttagttcttcctcaattgaactttcacttgaaaatgacaaggtaagattgctagattgcaccattggcagcaattcgtccttccaaatgtaaaattggttcaaaatatgtatggataaggaatgagaagaaaagacagatagtataaagtacctctagcattcagctagcatatctgtaatatcatgcaacgtgcaaaagtacacgcactcaaaaaaataagcatattatatagacacttgtactaggacaatataatcaatttaactcaaacctacttataagtaggtatctgaaagcactcgtgcacttttccttatttcaaaagttgacagtggatgggtcaacatttactttataccaatatattgcctacaggctacagccagatttagaggcatgcatatcagtaacaaataaacaaatctgtattcagaaacatacttcactagaacatgctagggtaactaacaccgagacctcaggtttttctttcctagagtcatctaacaatcaaaatctaacatctaacattataagtattggagaatacttactcggtccacttttctttttgcttaaactgatctgtaaaggctaaactacagttagtagttagtctatagttagttagttatctgttaggacagctgtttgacagcaatcactaactaactcaggttagttatgccaatggaattgattagaagaatattagttattaattggcacaaattgcagaatatctgttattattggcacaaatttgttggccattcaaaacagcaaatcttacatcattatactgctgtaattacctccttaattagttatcccagctgtaggatagcatttattgcagattggctatttaatgcacagatgtagaaatcaaattgtatgagcactatttgatgcagaattctccacaggagaacacacagtttttcatctgcaactttcttagtctaataagttaacagttacagttgtttaactgtctatataaattgaggtgtaatcatctttctgttgggttgaatacaatcaacaatttcacctcactttagttttctgaaattctcttagattcttacagttgtataaggcttccattctatggtagggttatgcaccatgtgatcaggaaactaatatgggatacaaaaaaaaaattatacatgaggcttactgctaacttgcttttaaagtaaaaacattcatatataaattacttcacttcaaaataaattttacataatcaatttcattcaaaattaattttgcaaacaaatcactcaaacacactttatgtgctttaaatgtataaatgggtcaatgggaaagtgattttcttgggctttagaaagagaatgtgctcatgtccaataacagactaatgtgcttagtttgaggcccaaattaatatgtctcttgaaaaataaaatggtaagaaattttatgtgctgcttgttcagattatctgttgcatgtgagttacagtatgtagaaaggaattatgggaagtttgatgaggacatttaaaagtttgcaaatggataagaatagaattttctgaggtgcaacaggagtggaatcaaaggaaagtattgacaatttactttaacagttcaacttcagaagcaacctacaagaacatggaaaaaacttggcattgcaatcattcagggaagatagtttggtcaggtatttttacctcattttttggtaaattatagtcgtgaaaaatggaaaatctcacttggtttatcatcttgcccaaatttcttagagtgaaacaatcaggtagcatttcaaaatacaactcgtccagtatttcgtatctgccaatactaaggcttttctaaatatatttaacaagctgggtatgaataacatctgtgctctaacttaagtaggagttagttgtattagtgtgagagtatctcttgccctttgctcttctaacactatcaaagactaactccctaaaaagcaaggtgctttttacccagggaagaaaagaccccaaaagaagaagaagaaatagcagtgtggtgatgggatagtacagatgaaaggaagagagaatgaagttaatattttttgtaagaaaaagagagaatggcattactctctggaaagaatgaagaggcaaatgaggtcttttttctgggacgagagatattcatcataggatgagggacttttcttcagaaaatatatttagttatttctatttcttaaaaaaaattacttactctcaggcatctttcagcttttgattgatcagattagatttttttttgatcagcaaagataataatattattggaaatatataatagcagtacaagtagtactactgtgattacaacctaaacagaagcaactcagaacaaaggtggcttaaagcattggctaagacaccagcgttctgaccaactgctaggaacaaaacctccccaaaaaacagaaatttagaattatacagatatgaccctcccctgagcatcaaaacagtccctcaaattgctagaccaatgataaaaaggaatggcaaaaccaggctctaaatttttgagccacgaccagcaaaaaaaaatggagtcttccatcagctttagaccattaaacacttcattatggtagataatcctgttcctatgataccagatacaccaagtcaaagcaacccaccaaatctgccacctctgtgacttaaattgacagaaagagtgttggtggaagtgctcctttgggacaacagaaaaagccccaattaggtttacccaagatcttgattcccaccacaacggcataattttatcacagctgaagaataaatgagaggcatcttccgcgtaatttctacaaaaagggcacatcatgtccgtgacttccacatttcttctgcttagattagacctggtacacaaaactccaacatctaggtcatcctaaggttgtttcttgggagagtcacactagtttggtgccttgtttgtagggaatagttaaccaatcaaaattgttacacttacgttgggttgtttatgtcaaactgaataaccaatctagtggttatttgatccttatcagacaataagttgccaaaatgctcctcaacaaaatgtccccttggtttcttcagttaattactaagtttaatataccaccaaagatgacaaccaattttctttcaataatcaagaaaacaacagcaacataaggatttatggagagatgtcaaaaataaaatgaaaatgaagattttgtgcatataagctacacaagaattaataactgcaataaatatatttagtagtcataccttagctaactggatgaatgctttttcccaagctattgccttcccattctcatctccaacttttgtaattgcattattgacagggtacgtgataacaaatgcagaagcctagaataggtgaatcagcatagcagtaacacataaaaagaaatctatgctaaaattcaagattcttacctcagaataattgtttccagaaaaccctcccaaggcagtagttggctcaaggggagccttaaatgcactaaagcatgtttcagtagaagtgtaatgctgaaaatgataaaataaaataataagatttaagtcttattaaacacaagctatgagataaattcaccataatctataagaagtaattatgtatagaagcaccaacggagctttctacattcaatgcatttgacacactacagctacactatttataaagaaaaaagaaatgaaaagcaggtattccttccatacctatgcaaatatttcaacttgaattagtatgcttattggaatttagtgtttcttaacacattaatctttttgttttacaatatttgtctgctcataaagtaaaactgttttaaattaaactcgtttgaataacaaaactaaggtaatccataatcagatcacagaagtttacctgaaaacaatactcagcatgttcaacacctccgtagttgtcataattgtcagggtccatttgaaaatactattagaataaaataaagacaaaaaaggaaatcaaatgacggcttctaagtatgccaaaaaaaaagaatagtaaattgatatagaactgaataagaaaagccaactggttgtacaacttacagataatagaagccaaataattaattattcgcaatacacaattcaaaagtactacaggaataatttggaaattagtgggttggacctgcaaaatgctttgagtggcacattcgtagcctaaaggcttcaagcaaatgtcactcagagatactaacaaaccagaataatttgcacgaattccatcaacctgttggaatattgaaatgtaaacatattttttaataaagaaggccccactaagcatacaacagctccatttaaattctagtaagtaaaaaaaactgaaaatcaaaacaccttttcctgtatttcgaaaagcaattcaatattttcttctgttatgatacttggcggtttgccatgcttagattcagggattgtcgctattatgagctgaaatatacacaaacaatattttaaaatgtgatttatttcagataaaataatagcaggaaataagaaggcaacttaacaaaaacattaaaaaggaaactatggttgacttcatattctccgcaaagtacatgttttcgatagaaacggaaaactttcttggaaattggaattgcatcagcatcaatatcaacataataataaaatcaaaatgtcttatttgataaataaacaaaacatatctattgagatttgctgagatatttatctcattcatacttagttagtcaatacagctgtgtacagctgtcagttggttagtacattgtcagcaactgtcactagttagttaggatctctgtgcctatacatatctcagtgtaaacagagactctttgagcaattgtaatttctcctttgatatcaataatatcagtttatcaagatggtatcagagcacttttttttttttttttttttatcagagcacttgaattatcacacagcaccataggagtgaggtgagggactgcaagctcaccaagaagagtctgaatccacaaaatgtcagctgtagcagccaaggcttctgacctcagcctcagtgcatcttaggaagtagtggtatcttaattgctcccttgtaaatagtctttggcattaatcgtcattgtaatactcttgaatgtaaatagatcatttttctgtgtggaaaatacattcaagtatctctcgtatctttaaggaggtttcattggatcaaaaagtcagaaatttggcttctatttggcataaatcacatggtctttttaagggaggggagatctcccttgtagatatgttcagggattaggtagcttcgtttcattgaggattccttatttttcaaactctaattttgttctctccatcttaatatatttcttcctttatttatttattttgttgggggggggggggaagagagttggtaaaggccaaacatgcaaatgagcaggcatgctagataactcatttacataagagggagcctagatttcagtaagtagatgacacacatggaattacgagaccagaaagaaaagtacaataaattacaagcaaactgaaacctgttcaattctgtagaatggagcaaggtggctatcaaaaaactctttctcttcagctgccttactcccgggaccaacccataactgcaacacaaagaagacagcaaggccgatattcttcaacttcaagaagaaaataaggattacgagcatatatatgttccttttaaaacttattgcagttgaagtactagaaaacattttgttgtgtgttggagagggaggattaaagaagaaatattattaaagaggcagcgagagcaagatacccatttagagaataaatgtcctccagcaagtaaaagaacaagaaaacaaacacaaaaaccattccacagaaaaatcatgattatatatatttagaatattgagaattctctaaaattcaggaattaaggcccataaattgactggtatgtatctatccagaaagctcaagaagacaaaaaggttgttgctataagaatgaacccttggacagtatttttttttgtttagaagcacttatttggtaccataagcctttatgaaaatatttttcttgacattatttataagtataggttcacagtgtaaaacaattttaatttgcttgagctattatgcaaaatgtgcttaacatttgagcatatgttccaacagctcatccaaacatgtctaagggtagattaaaaaaaacaaagtaacagcataaaaaggataaggtagatattatttgatagccaggaaggagataaaaaaaatggatgtagaagttacagaagcaaatccaaattgtacactgtggagataatatagatgaaaatatggtaccttctcaggccgggtctccacctcaaaacgaagcagacccaaacaaagcaaaacaacaattgtcaatgaggaacaaagaacaattgtgggttttctagcggcccaccttccatatgtcctgaatgcataaacaaaatcaaagattatgtaattgtaaacctagcaagaactgctagagccaccgacctgtaaaagctggacaggcatccttgaacaaaagaaaattgcaccacattctgcccttgaggatctatccgttgcaccttttatttgacaatacaaagccaacaatatcataatgagtaataaataaaactgctcattatacatgtgaaataaatcatttaactctaacacatcttaatatagaattgaaagaggcaaattgagaaacaagattccaggagttaattcaggtcccacagctaaaccagaagaaaacacaacaaagttgtattacagatgcattatccaaatcattttacataccatgtataaccagtgtttcctagaactccaagatcttaaatgaatttcttattcaatagaaaatagctccctagtccctacttatgttagatgctaagaaatttagacagtgtattcaagggtagcagtcctgtgcagttaaaatactgtaatacaaaatatggttcaacaaccactactatgcatacaattccagttatcaaaaacagactctcctcaaattatcttcaagtttaagcaggaatggattttggaaaacaatgttttcttttgttttttggggggaggggctcaaaagagttcattatgagagaaaagttgtatgagagaaaagttgtacagagatggagaatcagatatcaccctatagcaaggggagtgattgataaaaaaaaaatagcatagaagtgttagcagtccctttgcataataatacaaagaaactccttcaaaagactggtgaggtgaaacctgaaaaaatgttataaaaaaaaaaaggagcatgtaacaggagaaaaaaaaatgaagaaagaaaacattaagtaaaattaaggtatttcactccaactaaaagcagcatacaccaggcaaaagaacacatttcctaagcaatttattctgctttgcacatccaaaaccttgaggagggattaaaaactttcttcaaacagagaatacaaaagacttcaatctgcaaagctgcttcacaatgtatgaaaagatgactatttattataaaaaataaactacacataatataaatgctaacggaaagggtcttatgtatttggtgatttggaatatcatttatttaagagaataaataaaggttccttattattgggaaaaacccaagtcccacaatggctagagataaggcaaagatagaatatataagtggggggcaaccctcaccccatgagctagcttttggggtagagttaggcccaacccacattctaagacctatacttagtgttaattgattaacatttgatctctatgagatagttggttcattacatagtattaaagtctatatgaccaagtagtctagagttcgcccttgcagctcccattcttttaaataaataagttgaaattaagcacaagacaagcgaacctgaacattatctatgtttcaagcccaaagagctcttgcatgaattgatatgcacagattatttaattataaaatcagtcatttgacttcacctaacaattagcttttgggacagctggtttccacaattataataataacaagaagaaatgaaatcttccttctgaatgccaaaacgatgggtcaatacaaaacaagcttttaaacatacctctgcaggatgagttccatccttttggaggttagcaaaactactcccttcaccaaccatatcatccaataagggttccgcaccggatccaagtctcctccttcctcttgtcctttgcagcaatgcccatccaaacaacacgaaaaccaatacaatgtacaagatggccattgaaaaatctacacatctgacctgtaggtatcattatacgaaaaccagtttcacatgtatcaaaagctgaaagacagtttttcagtagagaaccaattgttccactagattatgattcataaggcattacttttaagaaagaaaaaacagagaatttattcagtcataaagcaaatgaaaattaattataaagaaaaaatcagcctctattgtttcaacctttagagatccaattctaatggagcagggatcttttcttggtggagaaggttctgaacccgagcaaacaggtgatgaaggacaatcaccacaagagcagcccagcgaagtgtcattacatgaatatacagatgcattcataagtttcataggagaagagtcaagaatggttgtcttaaaaagaatagaatacggagaaccaggaaaaccaggaggaactttctgaccaagaaatgcaaaccactctggcaatgacaatcaaaaacaaaacacattagcagatgaagagcaagtataatacatgcagataaagagaaaaagaaatattctaatggtatgaaaaacattagcagctacttagtaccaaaataggaacaagaaaaggtatgtctgcagcaacttaggaggatcttttgtatttttttatggctaaacatgtatatctgcggtctacctcagaactacaaacatgacatacaaggagcgccgatcaaaaaaaaaatgacatacaaggagtaagctaacattaaattaactccccattttcccatttattgttgtgcaaaactcaagatccatcccaaattataggaaaacatgcacaatgaacatatcaatactcaatacacgaagggggaatcgttctaattgaaaaggtaagatcacttaataacagagttcatatatttcatacaataaatccacccatgttataatgaatcacctttaaaattgctagctccagccccaacaaaatctatggcccttgtattcattgtcccaaactttacatccttacatgattcatatagaccttctccaaaagtttcagttatgtaataatcaatgccatccacagtcatattaccattaacctgaaatgaacataatatggtcaatatcaaattataatttcaagtctagagtgaatttataagactaaatcacatgaaaaaaactgatttttctatctatataataaaacaaagtatttcctataatattttttttttatcagcaaagataattatatatagatagatgaaaagaaaacaacacagtacaagaagtactgctgtaagtacaagctagcagaaacaaaacagaacaaaagtggcttgatgcatgagagacatgctaaaacaaagtatttcctataatataatacgtcataatgtcatatgctccttaaaacattacctgcctatttttcatctcttattctaaccattgatatatttttgtacagttgattcaacgatgagttcttgttgggtttctaacggaaattactactgcttgatttggagtcactgattttctttccaaaccacctcattcatttgctttgtttgcttcgggaggtagcgctaggtaagttgtcctctttcacaaaaattatttgggtgggccaacgtgatgttgcctattaataatgcaatttgttttgatttttccccctatattcaccaatttagttactgataaaaataaacacaaaaatcttagcccattaggtgaggtcatccacatggatcacacaagactattcagcttgataaaagaccatatcttcatggatattattcaccatgagatcccttcctcttaacaacttcctccaatgttcttctaagtctcccctctcccccttttcacatgctaaaaaccatgcaatctaatctcatcactggtacttctagtggtcttctttatatgtgcccaaaccaattgttgcctactaaagataaaatataacaaaaaaaactggaccttatatcaacaagaaagctacttgggcttaataaaaaagaaggaaaatgacaccagcagcacaatggaaaattattactatagttacaagtcatccattttggtacatatataaggaacaaggcaaccgtgctagtgcacaactcaacatactagttatttataaatatttgaactaagtttcatttttcccaataagtctacataaaacactaacatgattatgggtgcaaaacatcccgcatgggcattgaggttgcggagcatggtagaatgttaggatccaattgcaagatataggacttgagtctcacattggaagtatgggattctaggggggggtttataaggctttgggctctccaacttcaacagttagcttttgtggtgtggttctccaaaggtttttatcataaacatgtaacattaacaaataaaaacacaaaaagcatcaaatcattacattcttctaaactcttttaatgaggaaagattggttagttataggagcaatgaggcatgattaagaaactatagctaaacatatgcagtttaccaataccaagctaaacaatattgcaagttcactaaaatcatcatatttcacacctgaattagcaattagcatttaacctaataactaaagttttcatttatgatttcatcaatagataccattatttagctactttattgttgtattttttcattttaaacatccaccagtggagaggaacctactgtcataagaaaagaataagcttgcaatgaggatacaagcctaccaacggatttttttttttatcggctctagagactatatattattttcactttatttctctttattataaactcggaagcaaccactacataatttgcaatgaagctacagatacataaaataattgcattaatggtgtgtttggttgagaggaaagaaagggagggaatggaatgcaatggaatagagaggaaatatttgaattgaagttgtttggtaggtaagaaataaaaggcatggaacccatactgaaattcaaaaatttccagacaacctaacacacatgcaccctacatttccacacaattctcttcctttcttctcttttccatggtaaccaaacaaggggtaaagggaacactggtctggtgaataactggaaattttactccccaaatcgttcagtattatagacttcctggaactccaaaaacagcatctccaaaccataaaaactaacaaatagggtaacatgcagctaaaagaaaacaaatgccaaagttgtacagttacattaaaaagatatatatatatatatatatatatatatatatatataaaaacctagaagcacagaaaacactcctgtaaccataaatgagccacccaaaaacttaaaaagtaaaaaaaaaaaaaaaaaaaaaaaagtgttactaaaaaacaagttcagagaaggaaatgcctgacctcagaaagagaagtcacgttgatgaataaactctgattaggagagcaagaaagttcacaaaaaagattcagaaaattcctcaagcatgctggacagcccactagaattggtacagcctgcaagatacaaagtttctgttactgcataataaaaacagaaataaacaaaatactgataagggtctaggtcaatatgtcatcatgtcaatgaggtgattaatgagagtagtaaaagaaaattcataaaatagccagtccaacataaactgtatatattctccctcatctcctctatactagtcctgcatattagataagtttttgggatacccccggccaagaaaaagataaagcaatttatcataagctagaaatggttaagagcgagctaatgcaacagacaacaaccaaaatcaccgagttaaaaaacttgcctgttgaacctggactcttagtgtgtcaaactgatccgcagtgcaacaaacatttccagttatggtggggcacaaactttgaattttggcagacagtaggtctgatggctggagttagaagattatagttaaatgaagatggtgcggcattaattagtttagtaaaaaagagatgaatgaattaccttgacagaaggggaaccatatgggcaattgagagccttgttatcactgctttgaccgcatatatcatacattgcgcagtattcttcagaatgcttagccctaaagagaaattattagtggttcggaaaaaaagaatctgaatgtagatttagccgtacgtacctataggtttcatgttgtgaggtagcaggcgaagaagagagtaggaatacctacatcaacatggacagtggaggtgagtgtgatagtccaagtcaaccaaccgatcaacagggaattaagagaaagagaaagagaaaggagaggaatcagttcttgcctgtaatagaaaagcaacggagaagatgatatccatagcaacgccgatcagatgatgaatgatgacactgctacgctacttcattcctcaactcaactcaactcaactctatgcttgcgtcttcctctttagacggaacctacaaggccagttattcaacctttttttactttttttcatttcccacggatatttttctcttacgtcattggttcctgaatttctaaattcagtcacattaattcctgaatttaacattttcccacggatatttttccatttccatttttaacgactaagctaattgtttagtattttctcttaaaacaattaattttgagataattacatcttacttactatgttataacttatttttcctctttttttctttcttatttctcattctcattcctatcacattcacatatttctctttatttttttctcttctcttagtcttattcatctttctatgtccaaatttgtacattaatattattcttgatttcttgttttcatgacatgacatgatcttatgaagcattaaatataaatactcccaattaaagtttataccttagatggaaagtttattttataatatatatatatatatatatatatatttctcatatttttttgggacccacttaattgaaatatatgataaatattttgatacatttgttaaacttttattgagtaattaatctctattattttattgaataaatcctactaagcctgatttaattttcttaaaattcctatgtaatcgttcatctaactaaaaaaatgagtaaatacattgtttattatttttatattatcatttaattacaactcaaataaaattatcttacataaagaataattttaatcttaaataataaaaaaactacattccaaaatatgaataagtactccaaaacttattttgaaatatctatttttgaatgtattttttatatttaagaatagttattctgaaatagggcaatatccttgttcctttttaccctaatagacctttcatctgcgctgcaccacccccagcctctccttcatcactacctcgcaaactcccaagagaaaacccaacgacatcgtttcactccacgtctgttctcatcccccattgcttctccgccgcacttgcgccacaccttttctgtgagcttctccaagaaggaccacaaccatagcctcaagccgtagaagcaaatcgacattattgaagaagaagggcttcttcatggggatggtcgccacaacggactttctcgtcggtgctagtttcttgtgttggttgttgggtgagtcacagtggtgcgatagtgttagcactaggaacggcatcggcgtcagaaatcgtgctatcgaggcggaggcgacagtggaggggtcggttgtgtagatttagggttgagacttgtgggattaagggcaattttgtccacacaatttaaaatggggagtgcaagaagaaaatgccagataagatataaactaacaggcgcacagaagaaaatgtccgttacactataatcttgaatatgttacgaagttagttgtacaaaaccgaagctgctttgtaattaatcattgtttctggactcttctctctttcaccagtccatatatacgtaaacaattacattgtctctagatagactcgttgaatttaatgcaaacacttccctgataatgttgtactagagacctctccatttgtttagcagaacacacaataatttacactttacaatactaatacagtaatgcatgacttacccgtacaaatctgtgagtccaagaaatacataatgaacaacaggcaaactcttaaacggagagacaaataacacaagcaaccaaagggattagttttcttaagagaaactaataactaccgtcctgacgtggagaacgatggtgcacagcctggtgaccttgacgtccggcatgagtagaacggaatttaggctccacaggtttctcattggcagcttgaattcgctccaaattctccaaaacgtccttcattgatggccgatgtctgggctcagatgcaagacatttcaaagaaagctgagctatacggaatgcagctttggatggaaattttccttccaatcgagaatccataatgcccttcaattttcttctgtcaagcaggtagggtttcacccactctgttagattttgttgcccacttggacgattggtatcaagtgctcgtaggcctgttagtatttccaccaaaacaactccaaacccgtatacatcactctttacataaagatgccctacacaaaatttcaaggttacgtacactaataatcaatttaaatttccagcacccccacaaaaaaacttgaacatgacaaaacagctggacaaaataacatcacttgctttaaattcacgtttcaattgggttattttgtatctaacagcttataattcaaaaattactgacagagttttgaaaacacaagaaaaaaaatcagttttaccaaatatgcacatgcaccacaattagaacagcgtgacattacctgtggccacatattcaggagctgcatagccgtacgtgcccatcacccttgttgtcacatgggtttgactagctgaaggacccagttttgccaagccaaaatctgatatctttgcgttataggactgtagcataacagaaattaattaagttgaccacccaatagtacacactaaactaaaacgatttctgatgttgaagatagaaaataagtaaaacattaatttgtttcatcatgctcatagcatggcaacagcaaatatatattgtgtatgcttattttgtgcagaactcaccccatcaagcaatatattggaggccttgaagtctctgtaaattactttctcggatgtatgcaagaatgcgaggccacgagctgctccaattgctatcttaagccttatatcccaaggaagtggttgaacagcagaaccccctacaattaaaataatgtagcttttagttgaaaatatacatttaatttgctatttcaattcatgtttgaacttataatacacttgccaagacagtggcattaagcactcacttccaaatagatggttttccaaactgcccttttgcatgaattcatagaccagaagaagctctgattcctccaaacagtatcccaacagcttaacaagattaggatgagaaagacgtcctagaaaacttacttcggactgcaccaaatgaatgaaccattagtttaatagcaatttataagtgtacgacaaaacagtttgatgaaacaagtaacaaaacgaaaggagggggctggggacacaaaccaatgccttcattttattacaataccataatatattacacaatttacacatgatgaaactctccagctacactattcagaaactccctaaattcagcaattcaactgcttttttctgtgaataatgctacccacacggtgacatggggatatttccagatttgagatcttagaattctgtttagtaaagcagtcaatgccatccaagtaagaagcagtatgctcattctgctacgctttgccttcatcctaaaactaaaagggaagggaaattgcattggtacgacgacggttattatttgagtttcaaaattctaattcttgttccaaattattgcttgaaactgggctggagaagggtgatactaccaaaaagtttttgtgcataaaatatcttcttctggggacgggggctgctcatagctagcggagtacattaagtaacaaaaggatatgtagaagtaaataaagtaaaagcggtttgattattatgaaggattacctgccactcttcaagtccttgtaagctttcagagttgagtttttttacggcaattactgttccgcttccaccctttgacgtggccttttcttcaagccaacccttgtagacttttccaaaacctccctccccaagcactgtatcagctctgaaatttctagtcgcagccttcaactcggcaaaagtgaagatcctcaaattggaggtaggtaagatctgtccatttggataaggctgaccaccgcttgacactgagaacttgctatttatggagctgctcccacttccagaagaagtagtagtcgtagtagtagtagtatagctgccgctgctgatcgcctgagatgtccccgtcgtacctgcacatgggaaatcataaattaaatgaacacatgagaaatcaaatgaattgagaccaaagaacaaaacaacccaaccaacctgtactaaggttaccggtagttattggggttgggttgtgaggtggagaaccccagcaatttcccattgaagctgtaccttgcaccctgcagaaagaataattttgtagctcttcctcagtgtttaaagttgaacaccggtcgatgaaagctttcttcttccttccacacctgcctttggtcttctctctttttctttgccttcaataattgaatttagctttgaagagcctataggaaatgtgtatggtacagtaaaaggcaaaactttaatggaaggatgatttattaattgttgttgtattgacatattaagtcacatgtgcccgggatcaagttataatacccctgttggaatggtggaatagtggtgaaattggacagtgtctcctcttaaattttcgttgaagagaaagagaaatcagcttataagaacagaaatggaaattagaaagaaagtgccgcagacagcaactaaaaagaagaataggagaagctagctttgtcttatttgggtctaatttgctttctgtacccacttttttttctgtagtttcatattatatttttgaaataagcttttgagttttaatttaggtagttgctatttacaatcttttttattattaatatattttacttatattatcaaattcaattgttattttggatttttcaatatagaattatggatgaattttcttaatcaaataattttagttatatacatatatataatataattttaagcgggtttataaccttgtacataaaatattgatttaaattttctttaaaaaaaatttcggggacagccccccaccactaaatctgtggacataaattattttttacaaggttaaagtgccccccttaatttattttctggatccacccctggactgggtcagggtcagtgagttcaacgtgggaaagaggctcactccttcgcaggtaattgctgccagtctacacttgttatcccagtcaactttcgtagcttggtttggcgtggggagagaggatttagtcaaatcagaccaaagtcattttcataattctaataaattaacccaatctcccgcgtttagtttacatcaaccataaaactgtgtcacagaaacccatatcccttctccccgtctgaaatagtcttacacttttacgaatttctgccagagttatgatgccgttgaatataattaatagacgagttttcgacagctcacacctgaattcgattacttaagtagaatgcctacacttgaatcaaaagtagcataggaatagaataactaattactaatttgcatcctagggaaagctgtgttattataattgttattgacctctttaaacaatttgtttttggtcaagacttaaaattaatgtcattttctctctcttttcttcttatctactgtatttatttattgtatgagtttttttattatgaagtttatgtagaaatataactgctcggtattatcaaatcctccgtacaagttgcgaataaaaaaattctttcatgttttcctttattccttattttgtcttaattattaaattaataatgtaaattaattaagctcaggttggaagccaaaaaattcgtgcctaaatttgaaaggctttaaaaaaaaaatactttttatccagtctttttttaaacccagttcgcttaattttcccccacacttttgtattttaaatgtaatttctgtacaatggagtgtaaattactcgaaggattttcgttgtgacgggaactcgggaaggctgcgcagaagctcgtacgttccatgaaggattttccgagtcgacgcggggataaaggattggggaatggtggtgaagatggggatacagtggatgcagggggcgctacgcgtgttctggtggtgaagctgaggattggggaggtggcagaggcgagttcagtggtggtgttgctggtctctgtgtggaggagagggagattttgttggtctctgcggaagagagatgaacaacagagggagaaatagagcacttgaggggaagaggggttaggataaatcaataactaaaatccacaaacctaattttgttattttttgaaataatttgaaatctgttttgaaaagaagaaaaaattcaactggcaaccattttatccaaacacgtttcagttttcaaattatattttaaaatcgaaaatggcaaactcacaaccatcctcaaccggacctaatattttttcattgcttcttaattaatcattataatataacaattagtattcattacttcattattttataattcacaattagtattctaaaattgttttacaactcaattattagtttgagtcaatctccaaaatcaaaataaactatcatggcctgcgagtgaacaagagtgatgatttggaatctttttactttttattactcataatctcttacatacaatacatataaaaaaattagataattactaatttttattatatatttatttatatagtctggttggttggatttgatggaatttaaaacttataaatccattacctaacccaatctaatttggtgcactaaaaaagtccaactcaacccaataactcaattaaattccactgcacatgttttctttcccaaagaacaattgctctacaattttgggctaaaaaagtcgataaaactatctttaagtaataattatagaatttagatgtctctatactaaagaaaagtttattaagttctgtgtgaatgggatgaatgatttaagggaaacaaattaagaacttttttaaaataaaaaaatagtctttatactttttatgaatttttttttcttcaaagttttatatcattcaatttaatctctatattttatataaaacttagttttagttgctcttcataaaaaaacaccttaacttttgtctaatgtgacaaataaaatattttaaaaaattattaaaataaataactgtgtctaattagacaaaagtactttttataaatatttaagaaacaaatcatatttatttattaaaaacttacattttttaaaattatttattttaattttttaaaaatttaaacaatctctctcataacttacatcttgatttttctgaatttggagacaacctagatgagggtagacaaatccgttcattattttcaaactttagagtcaagtttgtgaaaagacatgctaatgtattgacttatgttcttgcatgagcatctacgtcatgcactaatctaaagtttatctattatgttcgtcattatatttcgcagtcgattattaataatatgcttgagtttatagggaaaaaaccaagtatgtaaaaaaattagatttttataaatatttaatgatatatatatatatatatatatatgtgtgtgtgtaaaattgaggggttcattgtctattgtgaatattgtattaaatatttgattttttttcttaaaaaaaaaagcatatttgatatttatgctgtttatagttattgagtttaaactctatcttcattaaaaaaaaaaggttttaactctatctattgtagcctcttaaaaaaaaactctatttattgtaatttttagttggtgtgtattaacatgctacaacaaaaattaggacaaaaaatcactcttttagttattctaactaattaattttaagtgtattgtagtaatttaaaattgaataatttaacaaataaaaaatatttttctctatcctttatgttctgatttaagttttttacatttatatgttctgatatttttgtcaatgattgaaatttaaaataaattttatgaattttcgtatgcattaaaatcaaaattcatttttagatttatcaactatttagaaaatagcattttataaattttgagatgttacgaaattcaaaattgttaggttatttataatttttttttcatttttaattgacaaggtatgtgagatgagagaagaggcgtgattttttatttcaaaaaaagggaaggataattttgatattttgaaaattgaaaaaagggggctgtgttgggggaaaaaatgacctaaaaagaaaaggccgagaaataaatgaagaaaacatgctaaaggttttcgaccccgatagtctaagaaaatataacaagagaaatgatattcacaccttctcatttttactaataaactccattttcaattgtaattgttttccaattcaccatgtttcgttccactatcctccacattcaaaatcctaatatagctataattgaagatacatatcaaaagtgactaaatgacatttgctaacaaaaactttttggatgatagcagggtgctttgaaaagggtatcatgaagagtgtttttgaaaattgatttctagaatgaatagtgacttacaatatccaaaaaaggatatatttggatttgaggtgagtcatagagtctatctctatttatatattatgttcttaacaattctattcacatgtcatggtctcacaaatctttcatcctcactctctggcatgggctcggtcttgtccccccatataccagatgtagttgtgtatgtcttacatatcaagacatacactttcgtgatcatgtcatcatgtttcaacaatttaagtatctaatatagatacaagactaactttttggagtgtctaaattggttgagaaataaagtgattatgataatgttatttttttctctcatgacctaggacacaagtccgtgatcaagataaactcaataacgagttagttaagatgatccaaaattttacaagtattgagcgaccataaatacttaagtgagcaagttggtttataggataagtcaaacaggatgatccaatacaaaataaaatacttatttttgataataaaaaatgacctaaaatcatgaataaaaattaaaatataatttatatttttttatgtattattataaatataaactttaattacataaaaaaaaaacttagaaatagtcgcagttggcgagggtctccccaaaaatgtgacgaggggtggtatttttgaaattcagacagtaaagagcattaaaattgtccgttgggcgaaaaatgagaatcgagggatgatctgtaattttgttgttgggtgagtgtgttgatcggattcgattggaggcaagcaaagtgcaaatcaagcggttaatcaatctttggggtacgaaatttgatgtttgttgagcttttatgaatcacaattaaatacatggtgtgatctgaaaaggcaaaggagaactaaaaaagtgtggaatctattgaaatcaggcggtgctgttgaattctgcaatggcatcggcagcgcctaatgtcgatctcttcgatgcctattttcgccgtgcagatttggatcgagacggccgtatcagcggtgccgaagccgtctccttcttccagggctccggtttgcccaaacatgttcttgcgcaggtctctctccctctattctaattcaaattctgcttattatttgatttacttcacatcaagtgccaccaagcatttcagagcattgttttttttgaattagttagtcactgcattagaaatctgttcgtctaaatgctaaatacttgagaaatcacactgacctgtctgtgtgtctgcagatttgggcatttgcaaaccaaagccagagtggtttccttgggcgggcagagttttacaatgcccttaagcttgttactgtggcacagagtaagcgggaactaactcccgaaatggtaaaagcagcattgtatggcccggctgcatctaagattcctgctcctcagattaatttcagtgccacagtatctccacctgcacctgcgcctgcgcctgcgcctgcacctgcacctggacctgcgccacagattggtcctgttagtcctttatcccaccaaaatcttggaccaaggggggcagtttcaaatttgagtggtaaccagcaaaccctcccttctcagggaaatcagtttgcgaggcctccagctgctgttgccactcaaggaatggctcgccctgaaacccccggcatttccagttatggcaagatgggtggaactccagaagtaactttctctccagtagcagttagaggaactagtcccccatcaacgcaggaggggtttgggtttggatcaaatgtggcacggccacctggccaatatcctgcctcccccataaagtcatcagatcaattggttaaggattctaaaccagtggatacttctgttaacggtaattcttccgattcattttttggaggagatttattctcagctagctcatttcagcccaagcaagcttcttctccacaaggattttcttctggcacttcagcgctttcttcagctattgttcctgtatctggaggaaaccagcattctactaggactagtactcctgattctttgcagcgctcacttgcaacccagcctgttggtgcaaagcttcagcaagcccagctggtggtaaaacaggaccagcatgcctcactccagacgcataatatgccgaattcatctggacttccagggagattacaggattctgcttccagtcaatcccaagctccatggccaaggatgactcaaactgatgtccagaaatatatgaaagtattcatggaagtagacacagatagagatggtaaaatcactggggaacaagcgcggaacttgtttcttagttggagattaccaagaggtatttttcttctacttccttgcctttttgtttggacagttggcttaaaacgctatatatatttttctacttctctagtgttctagctctacatgcattaggaaatcaactcaaatatgattaattaaacatatttccgaactaagttggatttgatagcagttttttgtgtctgtttggggtggggggttctatttagttttcacatcctccatgtgtattacttttcatggctagctaatttcttgaacattatgtttatgccatgttttatatttttcagaggttttaaagcaggtctgggacttatcggatcaagataatgatagcatgctttctctcagggagttttgtattgcattgtacctaatggagcgacacagggaaggatgcgttcttccagctgtacttccaagtaacattgtgcttgatttaccaactactggtcaacctgctgctcactatagtagttggggaaatccatcaggtgtgtgcccaagaattagcaggttttattttactactactactacaatactactattgtagattattactgatataacccttcagataaatgataaatttatatttttctcttatttttgtgtctctgcccccttttatcttttgaagcttttcaacaacaaccagggacaactggttctggtgctcgacaagtgaaccctgctgcaggtcggccaccaaggccggctgctgtctctcagtcggatgaaggacctcagaacaagccgcagaaatctagaattccagtcttggagaggcacctcattaatcagctgagttcagatgagcaaaattcaattaattcaaagtttcaagaagcaacagaagctgataagaaggtgcttttatttattttttgaatcatttctgctgttgcactttttatagggctaaaagtcatgcgatctactctcttcactggtgccttcagcgactttctttacatgtctaaaccaccttaacaaattttctgtcattttttccttgataagtgttacattaatatctcctcataatctcatatacaatcattccatattctgttcttttttctgtggtcacatcctttaatattatcatttcttttactctcacttttttcttttattgtccctttaaagttcaacattcactactgtagatagagtatattcagtaatataggaataagataaaagttacctttcagcttagtaggttctttgcgatcacaaatatggggaatgtgtcctctatgataatcttttcaggtcaattaatttgaggatgtggtgtgatgacattaagttatttttggtttcagtcatgaagcatgcttactctttttggctgatgattgaaacttacagctacaaaaattattagctgttactggtatctttgaagatagcgtggaaagatcatattgtagattgtcatttgcatgaagcatatcattattgcggtccatgtatgcttgataaaattcttgtggttcaattgaacatagtcaattctcatctcttcattttctttgttaaatgcaggtggaagaacttgagaaggaaattaaggagtccagagagaaaatagaattttaccgtgcaaaaatgcaggaacttgtgagtgttttccttgcttacttcctttgtattttattaaggcctgtgtatagaaaaagtggttctgtgatgcattgttttagagctttctttcagaagttactcttttttgcttctgagaaaaccactagagcagcatttttgaagtttttcttttttgaaaatttacaataatataatcattgtaaattcttttaagatgccattttaattaaaaagcactttttcttcaaaaaaataaaagaagcttaaataaaagaggtttaaaactctagtctggtttatctgagttctttttgtactgctttagtctcttttatgtcatccaaacatggtgaagaggtggcaactggatcaataatagctgaaacttttactgtacagggttcgccttgcctagctgtccaagctttagatttattttagaatatgcttaacagattaacatttgatttgtgtacatttatactgtatcttgatttgcaggatgagctatataccatatagatgtactgatgtagctagtagtagtaattgtgaaatgtattttggtcaaaaaattgttcaccatcatgatttattgtactttaggaagaatgcatcttacattcttacaaagagattttactgtcaaagctttaagggtgcaaaatatatgcagattgttttaagtatatataagaacatattcctacatcccatggctttgttcttattgtcaatatccagatttgttaaccaaactaatcattttttactatagatctgctgaacataattacatatcacctgtctgcctcttgggtttcctgtcctattaattttaaggaagtgaaaaagggtctcttggaaaggtcttttacttaattgttatgcattaatagatgctatcccttttctttcagcttttgtctgcttctgcagatacctaggaactactggaaaaaaaaaagcctatgaaacagacatgttcttttgtaacccttttgtactatgaaattgtggatacctagaagagtaaagcatataaaagctatcttccattttgttcgtatggttaatagtgtcagtgtcaggttaatacttaatattcatcgtttctttttcttttcaccttttttaaacaaattacttgttcttttgccaataaaaggttctgtacaaaagcagatgtgacaatcgtcttaatgaggtcatagaaaggatagctgctgataagcatgaggtatctttctttagaattgcatgtgtttttattacctcaataatcataatatttattatttgctcaatatattaatttcaggttgacattttagcaaagaaatatgaagataaatataagcaagtaggagatttatcatccaagttaactactgaggaagccacgtttcgtgacatacaggtgcaatgaaatatggctttatcttcaattgatagcttataagcatatatgctaaaaagtttgttatttttttttacctgttttgcttcattgctgtcaaatgatttttttttttttttttttttgtgtaggagaaaaaaattgaattgtaccaagcaattgtcaagatggaacaggatggaaaaggtgatgcaactctgcaggtacattttaatattaccaggtttgtgcatccatgttgagaaattgtgatcaacttatgtatctcatttagtcatctgaaattttcaggctcatgttgatcgtattcaaacagaccttgatgagctggtgaaatctctgaatgagcgatgcaagaaatatggattacgtgctaaacccactacattattggagctaccctttggtaaattcaaatttataattggtgttgttatatacttccagtccttctcaatctttttcgttatatggtatttagtgcatttgttttagatatcagctttgttttgtaatttgaggaactggccttcagttgctgaattactagttttgaatcagcagtaaaattatttctgccagtgaaatttgatacaggttgcttaatcaagtggcattaaatatatacagtttattctgattttatgtaatttttaactgattttgttgcaaagctctgtttgacaagctctataaaataccatatgatgatgctttgtaaacaatcagttaaaggttacataaaatcagaataaactgtataacctaatcaagtggcatttaatatataaagtttaggaaatgctccttatcatgaatgttttctcttgtgcaatttttttagggaatcaatttactatacaatattattggggaaaatccaagtcccacatcagctagagatagtgtcaagatagagtatataagtggggaacaaccctcaccctatgagctagcttttggggttgagttaggtccaaacccacattcttagatggcatcagagcttatcttagatccattaacgggctacccaccatattatccacgtaccaagcccaaaagtgctgggcgtgaggggatgtattggggaaaacccaagtcccacatcggctagagatagcgtcaagatagagtatataagtggggaacaaccctcaccctatgagctagcttttggggttgagttagggccaaacccacattctaagaaatatgatgatgctttgtattgatgcttatataattatatggttctttgtagtagttgctactgtacttgctatcaaatgttgggttaatgcattgattttatgaaaagaagggaaacttgaaactctctgatgtttctgagaacagtatgcaagaaatgctatgcatttccatcttcaatacatttgatttaattgatattggtggtgttctattaagtaatgcttatttatttatattgctctgacaaaaaactttagttgttggctttctgtatctgtatgattgcatttatctatcatgattttaatgaagctaaatgaatctgaaagtaaaactgagagagaactaaattgaggtgaaagaatattgtattcaacccaaacagaaactgagaacaatacagtttatatttttttttttttatcagcaaagataatatattatatatatgaaaagaagtacaagaagtactgaaaaagaaagaaaaggccatcagtaagcctaacaaagctttggcaacctaatacatgataaaacctgaattaaggtgccaaagatcaagctagagaaacccacttgatggcaaaagaaaacaaaagttatagttatgtaactgtcaactaacttgagttagttagtgacagctgtcaaacagctgtcctaactatctttctaactaatagcagtctaactaccaactatagttagactcacaacatgactaaaagaaaaggaagagttacaccgggtaagtatactcctaaagaagctcagaaaactttttatagcctacaaattgtctcttcatttttgttaaatgaacttgcttcctttttgttcacttacttgctaagtgcattgttagcttttggatataattatcatgtattcttgttttgctcattttagtcgggtcccatcatttctctttgctttgtggtgctctgcccacaaaccccatgtgctccccttagtatatattatattgaataatgcaataattatgtgcatatcgagtttgttgtattctgtagcctcactccattttatcctgcaaggctggcaacctggtatccaagaaggagctgctgactgggatgaagattgggataagcttgaagataaaggtatccaaaataaccctaactagatatgataatctgttaattgaataaaaataaaaatgctgtgccaattatgtggcatccatcattaattacgaggaatttttgcacaaggttatgaaaccacatttttattttatacgctcttattggatgcctacctgcctaccttctgtatcatcaaactcaattggatttcatttgcattttgataaggatatttttttgtcattcttataatttaaggggttgatctcaaaaagaaaacttgtttgtgaagtattaaagtctgtattacttgtttcttgttttgcttagtgtttttcatccttccatctgtattttcttctgcattaataaaattgacagcatgtatatgtgatacattatgatttaatgcattatcatttttttactgttcttccttggttatttgcacttttagtcctagtaatcacatcagatatgtttcgaaagttgggaggaaagggaaggcaatgaactagggaaaggaaatagagggttatataaacaaatttaccaaattatgtaatatttttatgctaaattgcaatattggtcccctttaatttatgatccgtgattttggacccccaatttttttccacgattttagtcaccacattttagaaaatccgcaactttggtccaatcctcaattttgcatacatttatttattttattttttaattttaattaattaaattatttcttgatacttgatagtaccttaagttaatatgttagatctagggtttattttgggccaaaataaaagaaataaaatgtatgtaaagttgaggattggactaaaattatggatattctaaaacgtggggaccaaaatcacagatcaagaattaaagggggaccaaaattgcaatttttcctattttttatgaacctattcaacctaattgatgataagtccacaaatacaaaaaataaagaatatagagataataattaaggaaataaatgcagacaatatctcttcagatcagagaagaaattgcaacattgaggtaagagctgaatcttaaggcatgcctactcatgacagacatttttaatagctgaaagaaaattataatatcagaagactaagcaaactgatctgcaacctttgtggcaagtaaataattaatgggtgagggataatgaaatttggtactcataagttttacaattggttgcagcatcaaaagacccaatagaatctggccagtcttttttctatttgtaaattattctcttctatgcactcacagaccttagtttctatcgctttctctcttctatgcactcacagaccttagtttctatcactttctctgcttgcctatacctctcttatatctatatttcttttacactaagtactttgtttgctgatgaactttacttagctgtactttgttgtgtcattattttctaagtgtagctgttcatctaaatgcaagggatcaattttgaacagttatgtagttcaggagacaatgcattccaaaaataggtgtatatttaagagatattataagatattgattgaattgaaataatggttaactgatacttgtttattttctgacctgcatctgttcttgtttggattatcatggaaaggactaaataaattttgttattcactattcttgcagaatttgtttttgtcaaagaactcactctcgacgtgcaaaacattatagcgcctccaaagcaaaagttgccgtcagctgtgaacacgaaagctgtgaacgcggaagctgtgagcactgacagtcctacatttgctgcttctcccaagagtgatgataagtcagaaaagccccagactaccaatgaacagggagttggcaatggatttgtttataataaaagtgatgatgggtctgtaaaaagtgctcccaatagtccatttgcaagcagtgctatcggaagcccgcatggggattttgattctgacattagaaagacagctggtgaagatagcttactccgtgatcaagataccatacaagaaacccaaaggtatggtttttaagatttattcaccagtttcccaaatgctggccaattgctcatttgatcatatatttagtaggcgtcctcttattttgctgaccattaatattctttatgcctttggaaggtcatggtatttttaataataataatatgatcatcaatattgttgttgttgtttttgttagtgtcttaaataactttttgtttatatgaatttttattattcctaccattgaatatttagatattgattcaatgaccacacacatcaagttttatataaatcagatatttgtagttatgtaatcttatactcaacatttacttatatttttacaaaaatattttatattttaaattaaatttatttaacgaagtatcaaatagttttataattttataaaaaattgtagacttgatgtactaaataagaacttttaatttaacaattggattaataaaatttgatatatagagttattgaagggagtaactttacaaagagttactcctcctatagtaactcgatcccttatctattattattattgttgtacaaatatgttgtactcctccactggatgctcccattagaacaaaagtttgttaccaagaagtcgacacaaaaagaggtagaggtcgaccgaaactcacccagggaaaggtaattaaacaagacctaatagagtgggatatagattggcggacgatgtgtcttaggatggagtggataaaagttataagcttggtggagggttaaacccattagtatgtatatgttccagtcgttcctttttttttagtttttagttcttttcctcttcatttctcccctcctcctttcatccttcttctattttagcttatttttcctttcttttgtcttattttccttttttcttcccatctccctttctctttctttgtctttttttccaatctatcattgggttcatctaccacagaccccaattaacttgggttaaaggtgctgttgatgttgatgttgatgttgacaaatacggtggcattatcgttaaagactccttggtctacacccaacaacttattcttctagaagatttgtccttgacatggttttacagcctcttactgtttggataaaagtttgatttgtgctgccccatttttttcaatcatattataactttagcacaaggaaaaatgagcctgtgcatttccatgcttcaactcaaagggattttatgtgagtgtgtgatagagaccccacggttagcaagttttcaagagtcattcataactgtcatctctcatatgatgtgtttaacagagtcacaaattgttgtatatcatcactttatagattttggactatcatatttttttatacaagtcatagttgaatggtgatactatcatcagcatacacacattcaggttcaggttgattcaggttctatcaaatgaccctattaaaatttttaactaggtaaggatcaagctaaagttgtgtcttggtgacttgttggtcataggttcgaatcccgaaacagcctctttgcatatgcaagggtaaggttgtgtacaatttccctcccccttacctgcgcatagcgtggagcctccgagcaatggggtacgtagtttttttttttttttagggatcaaactaaacctgtttcaacccgtcctatgaacatttctagtgcatgatacggactttaattcccaaatttggtttgaaattgattttgacatacatgagtgttaatagataccaatgtatattttgtttcatattttcacatagtatggatcttttgatgatgcaaaataatttacatataatcttgcatatgtagtgatcatggtggtgtcaaatctgcgttttctggagacaaaatttttgatgaaccaaattggggaacctttgacacaaatgatgatattgattcagtttggggattcaatgctagtagcttcactaaagaggtatgccaattctcacaccttaatgtcttggccaaattattttttatttcaaaacacgtgtttgccagttatatatatatataggtgtttgtgtgtgtgtttaaatttctcctgcactattctttcttgtcatgaccactggtggttgttgaaatatggagtatatgtaactaactgaattgagatgtaatattttgaaaacactaacccaacactatattctaatacagcaatgaatgctaatattcaagtaagtaacaaatgttgtataagtaacatgacaagactctttacacaataatgatattcctaatattctaacactccccctagttgaagattagtatgtcggcatcttgaaactttgataggctcaccaaagcacacaatgttattagggttcccaaacaatgacttaaatacatttgaccaaaaaagagcattaatagagacaacatagtgattagattgttagaatgatgctcatctggaagatagtcaagatgttacatagcctatgaaggaaaatattactggaaagatgcatactaggaaattgtcactattgagaacagtcaatgtggtaatacaaatcatcatttgaggtatgcatatttggaaagaatcaagatattattgacaaaagcatatagagaaaggctcaaatacactaaatttcttctaatttatctataacacattattgtgaaactttaaactgaataaacctcaaatttgttgagatccgatatcgactatagatacaaccatagtagaacaagggcttgaacaatggtaatttcaagagctagcttttgcagttaagataggcccattcaaaacagaattttgagacaaaaccttgatcatgtttcatttggtagtcttcctccacaattcaagtttactatatttctttcttttcttcactcgtcaactaggactatgggccattttgtttaaacttttttttatcagacccttttgtttaaacttgaaaaaacaatttataagaaagcgcttcttaagaagtagataggaattaggatttgcttcttaaaaaaaacagaacactgcttattttaagaaaaagtagcttagacaaacacatcagaaaagaagaaaactgcttattttattaaaaaagtgctttcttaaaaaatgagcttaaacaaacagacccatatatataatttgtagaaagtgtttattgatgttgagaagaagaaaaagtaagatacataattgaatccatgtgttagtgtacacagcggggtgtattattatatattatggtctatgggtttaataatttaattaaagagaaaataattacctaatttccataattatgtaactcatagaattacataattaccataattaaggatatttatatgcagcaattgcctaattaccataattgagacattgactcttggttgtgcctaataagcatgtgcaataccatgatagaggcacgaaaagttgacccttggtgcaagactacagttatattacaactctattagttcactcgctatttattgcctaagataaaaagttggactctaaattgaccttggtgcaaacctattttgtaaggaaatctttttttgataactccatttcatatcctttacaattttcttatataaaatacaaactccttatcactagagttttacattggacttcttgtggtaccctatcataggatttttccagataaatgaagattgtgctggtcttttgtttccttttatagatttcaatcgaaccaagcattagttggcctccatgtggttgttcagaatatgacttggatgttaaggagatctaaatggttacattacgtgatacttgtgatggaatatgaagacatgatgatttagttagtaggaattcagagcttttataagattttatgattgtgtcttaaaatcaaagggatagatgtgtcattctttgcaaaaaagtatggaagccagtttgcaaaggattgatgggatcagaggagaaagcataatgtaatctgaatgtgctagatctgccagcccaaagatatataattgaatatatttgaagattgactaaaaatactgaaccctcaccttctgttaatgtacttggtaatatatttcttaaatttaacattttgagttgcttgtacgtgtttgatcaatggatatttatactctagcaatctactcattactttccggatttttttttttttaaaaggagagagatcttgatagagctgggaacaactatttctttgattctggggaactggacttaaaccccatcaaaacaggttcaccacaggctggtgatgtcttccagaggagcagtggattcagttttgatgattctgttccaagcacaccactttacagctcaggtagctctccgcaaaggccaaaagagtggttggaaactgcttttgacttctcaagatttgattccttcagaacacatgatagtgtatctttgcctgctcgggagaagacagaacaatatgattcagtacgcaacagtgtggattttgaccatgctcatgggtttccagcttttgatgactcggatccctttggctctggcccgtttaggacttcatctgataatgaaactccaagacgaggatctgataattggagtgctttttagtttaggaattccacccgatgcattatttctttttgttttcagactttccgactgttgcctctggtggagtgggttgtctgtcttgctatctggaacctgttatgtgtaatgtatttcttgtatttaatcttgtgtattccttgttcctcactttttctttagggaagggcgcaggtttgtccccagtccagcaatcttacttcccttcttaaaatgaaagtgaaggcctgtctatattttttgtttgttggttgttaattttccatagtcccgtagaagagattgtggtattgatgactatctgatttgagtgttgtttactgagcggaattttattatgattctttgtcatatatgtggtgaagtataacttgaacctaatttgtccaattaaatttagtgaaatgtaaacaatatactttttaacacaattttcattattaactgaacttatttcacgtaattattagtgactgaaattaatagcattcctcttcaatctaatttcgtcagaactcgggggttggttctgattttgtagtaagttcttattggagagattactgatcaaattatgttgtatttgggtggaagattttaaaattaaaaggaaatgcagtaaactaaattgtcatcatctataaatttattgtttgcttagtcattaagaaatttaaacaaatttaaacctactctttattttgaaaaataattcgagtaaagtagagtatggttgaatctacaaaaattaaaagaaaacaagaaatataataatgtgcaaacaaagaaattgttagaggttcaataattagcatttataagactagtccaaattttcaagcctcgaaccaaaatgggatggaggctgcagtctcaaattatagatgtaagttattcctctaattttattcaattcacaattttaattctttatattttataaaaaataaaaatatttagtctctctcttttactacattgagaattttggcctcaactatcaattcaggccattgactgatatgtttagcgttgactgcggtgacatgcctattttttatttaaaggtgtatagtttttagttaattaattaagataataaaaaaactgaacaaataaaaattgtttatatattttagtttttaattaagttttattaaattaaattttgtcgtgatcaaaacattaattaaaagtttaatattatagtgtcacgttaacaaattaatggtcagcattttttatttaatcgtcaacgtcagttgagacttatgggatcaaaatcctccattttataaaataagagacttaaatattaggaccaaaatcatattttaacctacatgcatgaatatgaagaagctaaaaactcaaacaaaacaccaaggttgttggcgtctaagttatgccatttgaattacttcatagtggatattgcttaattgggagtccttgagcaaaagatgaagttggtaacagtaatatgacgtttggtaggttaatcatattttataattggtgtacatgtgtaatcccctcataaattattacctaacttagtctttttttttttttttttggaaaatatgtaagaatatatattaaccaaaatatagatacaaaaactcagggtataccctgactatacaaaaggaggctcacctgactatacacttgccccaaaagaagcaaatgagcaactaacaacaaaagaacaaacaaacaagctagcaaaagcccatttgctaatacaagtgcttcaggtgagcaaatctaaggatcatgaatttaattctatcaatcaagtcagccaaaataaatcggtgattatcaaacaaaatgcgattcctgcagttccaaatgcaatacaccacgtttgccaaagcaagacaacgaacgtttccctgaattcctgatgtagcccgcagatgcactatgttgttcagagtgccctggagcgaaacattacgtctcggaaagtttgcccaatcccggatgtgagcccaaactttgagggtcatatgacacttgaagaaaagatgatcatttgtctccgtttcacggttgcagaaacaacagatggatcccttattgagaaaaggggctcggtcaagagttagcaattttctgctagcggccaaccaaaaacagaaagcctccttgggggggatgcagtttttccatataaccttggcccagaattttttgggagagggatttctgagtgcatcataggctctacgagggttgagagtgccgttttgggtccagctgtgcaactccatctcagcttggttggcatcaccagctttgatcagcaggctgtctctaatctggaagattcttttaacaagcgctgaatctgaatccgcacatttatacagccatgcggaggttcccctcaagtatatttgatgaacccacctgatccaaagggattgcttctcggagacaatgtcccaaaggattctggtgagcaaggcgttgttccagcttttaagattgtgaagacccagccccccttcatcctttggactgcaaaccaacttccaagccacgagagctttcttcctccctaaaccgcccttgccccacaaaaaattcctactgaaggcgtcaattctatttaccacagccataggaagaggaaacataccaatccagaagttaaccaaacccccaataacaccccagattaattccagacgacctgcgtaagatagaagcttctggtgccagttttggatatatgtcccaatccggttcaagagaggggaataatggcagacatttaatctcgatgccaagagggggataccaaggtatctgatcggaaacgagccaatgctgaaaccagttagagtaagcagctcggaaagagtatcatcgtcaacaccagccgcgaaaagggaagacttggcgttactaacagttaagcctgagaccttgcagaagctgcacaatctgccataaattgctgccaccgacgggtagtcacctctggccagcaggactatatcatccgcaaaagccaggtgagtgatattgagcgcagcacacattgggtggtaattgaacaacatgctgtttttcagatcattcaagtcccttgaaagaaattccatacagatgacaaacaagtagggagagagaggatccccttgtctcaaccccctctttcctttgaagtggccataaatgcgcccattgacggagacactaaaagaagttgtcgatatacactccattatccatctagaaaagatgtccgggtagcctagggccttcagcatccattcaagaaaatcccaggataaagagtcataggccttgtgaaggtctatgtttagcatgcaccggggggagctacgcttcctgctgtactttctgataatttcctggacaaggaaaacattgtctgccatgtttctagctttcacaaaagctgcttgggctggatcaataacgtagggcaaagtaagcagcagtctctcagcaataagctttgagataatcttgtagattaagttgcagcaggatataggcctgaattgggtgacctttgtggcattttcagctttgggaatcagggctataaaagtatgatttatctgtctgaggagcttcccggaattgaagaaatctgacacagctgcaacaacatcagtcccaataataggccaggcttttttatagaacatggcgttaaacccgtccggaccaggggatttgttgatgtccatattagaaacaatcctccagacttcatcaggcgtaatgggcttgagcaaatctgggataagagtggttggaaccttggctcctctgtcaataacagcttgagaaggaatttcaccttgagctgtggtgccaagaacagaggaaaagtaagctgagaattcagcccctattgcctcttgggatgtagtaacacttccatcatctcgcataatggccgggatgaacttagcattcttctctttgttgataagagaataaaagaacttggtgcttctatccgtttccacaagaaacttgttttttgccaattgagccaccttcctggactcagctagacgcagctctaaagtgccagctctgttagtggcagccctgaggatattctctcgagaaggagattgctgggcaatataaagagacttgaaatattcctcttcagctctatcaattttgtctgagataccactatactccatattgtagaggtttttcaaagctggcttgagcattttcaacttcttgcaaagttgaaacattttagaaccaaacacctccctgttccaaatagaagctaccaaaggaataaatttattgctgtcagccgtggcattgttaaagcggaacgccgaatggcctcttctcctgctagggtcagaattgaccatcactgctgcatgatcagatatagacagaatgtccgacacaaaggcataagattcctgataggagcacagccagtcagcattacaaagggccctgtcaatcttgctccaggtggtcccatttgtccaagtatactccccaccacaagttctcaactgttgcattcccaggttagagcaacattcccggaaatcagccatttcataatccgatactgcagacccattctttctgtcatttgggctcagcacactattaaagtcacctagaataatccagcggccacctattctgctctcaaagctctgcaaggagctccatagaggccttcgagcagatatggaatgcaacccataaacaaaggaggcccaggaggtggtattggagattttacagagaatggagcattgaatggcttggggggataaatccagcacatctaaggtcactctatcatccttccacattagcaggatccggccagcattgtgaagtgagaaattgtgaacataattccagcctgaaaacttcttagtaatcagcgaatcgacacataagcttttcagcttagtttcaaggagggctacaacatctacctccttcaagcgcaaaaatttctgcacctctcggtgcttaaggggcatgttgaaaccccttatattccaagcagctaaaatcattgttttgggcgggaagaggtctccccgacacaacctgatttagtctgcttcctctccttcatttttcctttttggctaccagcaattccccctgggatcagaatctgtttcttctctcggggtcctttccgaatctcatttcctgcatctaagtacatcttggccttgtcacggtttctagatttctttttgatgaaaccatcatcactattatcatcagagcaatcctccactatggccaaatccttcccagcgtctccttttgactccttatgcatagctgctagagggcaagacgcgtctcctgtttggtggggatttgaggtgttcaaatcccctacttcctttgaggctagctcattgtcagttttcttttgggcctctggctccaggttctggattttgctctgtaatagtacatctttctttaactcttgttgaacatttctatttccctgcatctgcttctcctcccccccattagaggtggatttagcatccttacaacttttcccactgtgtcctatgactttgcaatgattgcaaaacacaggaacagtttcgtactcaatgtgttgcatgaatgtcttccctctagatgttttaatcatcacctcacgcaccaagtcaagtgatgcatccacctctaccaaagcccgggcgaaagatagagagcccctcgtggctgtcaggtaatccgttcgaataggagttcccactctggataagattttcgccaaagccgatgggttccacaactccagcggaaggttcctcatcttaatccaaactgggaatttgctaagttcctcatctccaaagttaaaaagttcaggcataattttaagcagaagaggcctctggaagatgaaataagggccatttgctagcacataatccctatcctcctcagacctaaacttgaaaatcagccacccactatcatggtttgagtaagagtattccaccccccatttctcacagcattggagcagggctttcttgcccgggaacctccccgccacataaccaatcagaccaaacccccaagccctgcttagaggctggatatcttcatcctccaaccacacaaagtttgcattgtccaccggcactggctcgagaactaagcctttggatggttgtcgattttccttaaaaaggtttacccacggagttgcaccatctcccttatcctcattcttttcctgactcctcctctcttcatccttggaagaggcatcattatcttcagtctgatccacatttgtatccttagtgcccagagtaatagatgctgtagcactggccgatgaaatttcagggatatttctttcaggcaaattgtcgaacacatggtccgcactgtacccgatttcctcctggtttctgttctcttccctcctctctggttcactcaactgaacctttctgtccggcatttcatcgaacagttggagggcttcgaagttgggagattcaatggtgtcccgagagtcactctggactaccacctccttccccttcatactggtacccttatgcctcgactgcttctttccttttcccattaatcactcactggaaaacatacccgaagcaacagagaagtggacaaacctgcaaataaacccaaaccaggaacagtccaggactgctgttcctgggcaagatgaagagaccacaacagagtactgcctttggcagagtacaatcaatacacagaatacacagagattgcggaaacaggaattacaacacgattacaactaataatcaacaaaaacaataacaacagccaacttcttcgacttttgtgcagctgaagcaccgcccaaaccactcactccgatggcctaaaccatagggacacgcccaagggagttcagaatgtgaagctacctaacttagtctttaaatagaaagtttctgggttaagatcaaagagttggaaacttgtacccaaactcacttgaaaaaccaaaacatacatgcattcagagggaaagatgtataaacttccaaaaagaaaatataaattcctcttggcatcataaagtgtgaaagctgtcgagatagcaaggacacagatatattcttgtacaaacttgaaacgttgaaattaagtacgataaatgaaacgtcacaatctgcttgcattcatgtcagtcaaaatggcccttgctgtgctcactcagacaccgtcccacttactgtgttggacgtggccctctacccgcgtgacgtggggtttctgctttcattgcctcccgctacagttaaagctatcactatctcttcaccactcactctacattccttcatattgtctgtctacacttcccattcaaatcaaacagcagcagtagtagcctctctctcgacctcctctacattacatatataattatgaatcatagtttctggatgaatttgctatgcgttgcattattaacattgatcctattacatggagcatcaagaggacatgatgatgtcgtcaaaatcggtgccatattcacttttaaaactataaacggacgagtttccaaaattgccatcgaagctgctgagaaagatgtgaattccgatcctggcatcctggtgggacgtaaattgtccataaccatccatgcttccaacttcagtggttttcttggctttattgggggtatgtatatgtatcacttcctgctcctgcttgcttgttttattttatatatattcatttacttcctaattcattccagccctcaagttcttgatgaccgactcagtagctataattggtccacaatcttcagtaatggcccatgtgctttcgcatctcgcaaatgagctccatgttcccctactcttctccacggctctggaccccaccctaacacctctccagtatccttattttctccaaacagcacccaccgatcacttccacatgaatgccgttgccgacctcattagctattttggttggagagaagtcatagcagggttcagcgacgatgatcagagtcggaatgggataaccgttttggggataaacttgctgagagacgctgtaagttgtcttacaaagcagcactgcctcctgatccgactgccactccatcccctgttactggtcagttagtgaagatcaagagtatggagtctcgggttatcgtcttaaacaccttcgcgcaaactggtctgttggtttttgaggtggctcaaaagctaggaatgatgaccaaagggtatgtctggatagctactgcttggttatcaactattttagactcaactacttcactaccttcagatacatgtaactcaattcaaggagttattaccttttgccctcacacccctcaatccagaaaaaaaaggcatttatctcaaggtggaaacacatcagtaatggctcaattgggttaaatccatacggcctctatgcatatgattctgtttggatgactgctgaggtactcaattttttttttttttttttgatcggaatggtaccatttccttctctaacaatacaaacttaagtggtacgagggaagaggctctggatttcggtgctttgagcgtttttgatggagggaagcagttacttgataacatattgtgcattaatatgactggattggctggacctatcaatttcgttcagatagatctcctctaaatccatcatatgacatccttaatgtaattgctacaggttataggagtatcggctactggtctaattactctggcctctctataataacccctgagaaacttcacgcagagcctgccaatcgttcaatttcaagccagcatctaaaccttgtcatatggccaggaaatacaacagaaaagcctcgtggatgggttttcccaaataatgggaggcaactgagaattggagttctcaacagagttagctatcaagacacggtctcgcaaataaatggcaccaatgcagttcaaggatattgcatatagatatattcctagctgccgttaaattgcttccctttgcagttcaataacagttcattctgtttggagatggacacaagaacccaagctactacgatcttatcaacatgattacttctgatgtaagtaatgctcactacagagaacaaacataatgtagtaatattttgcttttatataggtagtacctattaaatcctttaagttatcctcaactgtacagtctcatacctgcacagcctctggatccctctcgttcgggtgtgtattcgattcattcatgtacccctcccgctggtacctgccaggaaccgctccttgtccgtgcctcactgcaccggcgatcactcctcgcgctcgtcagcgcccgggatgttacatgcccaccagcttccgcctggttcgtcctcgaaccacaccgtactggtagagaggccttgctctgataccacttgtaacgcccggccacttgcgtccctacataccaacacaagacttttcagtgtgctttgtcctcactcacacacttcctgagaaacttcccaggaggtcacccatcccataattactccaagtcaagcacgcttaactgtgaagttcttatgttatgggctaccgaaaagtagatgcaccttgttggtataggtagtacctattaaatcctttaagttatcctcaactgtacagtcccatacctgcacagcctctggatccctctcgttcgggtgtgtattcgattcattcatgtacccctcccgctggtacctgccaggagccgctccttgtccgtgcctcactgcaccggcaatcactccccgcgctcgtcagcgcccgggatgttacaaccatttactccacagatgtgtggtgtcagtgtgtcactgcattttttttcctttttgttggagcagtggtgtggattcttgaacatagaacaaacaatgagtttcgggggtcaccgagggaacagatagttacagttctttggtaagtactcttgtagcttgtgcacatatctagtctggtcataactcatctttgtatgctgttgcaggtttagtttctcaaccatgttctttgcgcacagtaagttgtccacccattttgacagttcatgtcctattcatgtttgtggctagaaacagataagcttctttattattgtttcaggagaaaacacagttagtccacttggtagtgttgtgttgataatctggccttttgtggttctgataatcaattcaagctacactgcaagcttgacatcaattctcactgtgcaacagctgtcctcaccaataacaggaattgatagcttgatatccagcagtgaacgtatagggttccaagtaggctcatttgctgcaaactatctcactgagcaactcaacatccctaaacatagacttgttcctcttcgctcaccagaagaatatgctgtcgcccttgaaagcggaactgttgcagctgtagtggatgaacgatcctatgtagaacttttcctttcaaaccactgccaattctcaataaggggccaggagttcaccaaaagtggatggggatttgtgagtattttttaaaattacttactggtacttttctcagggtgtggttttttatgtactttgttgcactaactactaatgcagaaagcaaaacatgatgttagaaggtatgatattttataaaatgggaggcaataaatcacaacttcgcttccctttagcttctttgaatgaaacaatgaacactatatatgttgatggtagttgagcacaaattttgctcaagttcagtactactcgatcctagatgattctcaactgcaattcatgtacttgtaaatctttatgttactacttgtctttgattaatttcttaggtgtcacggcaggcattcccgagagactcctcttgcaattgatatgtcaactgcgattctaaccctatctgagaatggagaacttcaaaggatccatgaaaagtggctttcagaaaaggcttgtggttttcacagtactgaggattaacagcttcaattaaagagcttctggggcctgtttctaatctgtggaataacatgtttcctggcgcttcttgtctattttttttatcaatggtacggcaattcaataagaaaacccctcaaaaagttggtatttctaatcattgcagctccgttcagcacgcatccagacatttttagtgacctcactcacctaatgttgaagccaaaacttctgcttgcttctggtgaagatatataagcactcataattaatttagtaatattacagattatttacttgcatctaggttcaagctagtgtgaaacatttatagttaaacgtgttcgtttaatcatgcatatttacacaacttgattttagcggttacatactatagcaatattttttcaatgaataaaagctaaatgatacttttgattatttatgttttaatatttttagttttgttacataaaattttaaaagttttatttttattttttatgtttttgaaatgtttcattttaatcaatttttttttgttttaaatatgttaatcgaaaaatgtgatgtatttgtcaatactaattagaatgataatgtaacatattaattgaatcgataaattgaattattttataataaatggataaaataaatattaaaaaatagataatggtaagagtataattaataaaataataacaattaatatcatcttaagtttttgttttaaaaaaatgggcagataaaaattagtttttgaaagaaaaaaaagtaattggatctatcttatatcattcaaaattaccttaaaattcttattaactgattttagattaaaaaattgattttggttttagaattaatacttatttaaaataatttttaagttgagtaaaaaaaattaaattatgttactaacttaattttaaaataaaaccttcgtcatatttcttaaaaattctaaattaattttagaaagtttcagcaaaactatggactcccaattaaagtaccaacaatttttgttttggttgggcatgggaatgacccaaacaaagacacaaagtaaaaaatgaaattttaaatttaattgaaatacataacttgaatcgtagttggtaggattataatttggaagagacaaacccgcaagagtggagatggcgacgtcgacgacgtgcttcctgtgtccgtctacggcgagtttgaaaggcagggccagattcagaatcagatgctgcagcagcaacgtgtcagtcaatattcgaagggagcccgaacctgtaaccacattggtgaaagcgtttgctcccgccacggtggcgaatctgggtccgggattcgacttcctaggctgcgccgtggacggactcggagacattgtgtcggtgaaggtggacccacaggttcaccctggcgagatatgcatatccgacatcagcggccacgcccccaacaagctcagcaaaaaccctctctggaactgcgccggcatcgccgccattgaagtcatgaaaatgctctccattcgatccgtcggcctctccctctccctggagaagggcctgcctttgggaagcggactgggatccagcgccgccagcgccgctgcggccgccgtggcggtgaacgagctgtttgggaagaaattaggcgtggaggagctggttctggcatcactgaaatcggaagagaaggtgtcggggtatcacgcggacaacgtggcgccgtcgataatggggggttttgtgctgatcggtagctactcgccgctggagttgatgcctttgatgtttccggcggagaaagagctgtatttcgtgctggtgacgcctgagttcgaggccccgacgaagaagatgcgggcagcgctgcctacggagatcgggatgccgcaccacgtgtggaactgcagccaggcaggtgctctggtggcgtcggtgctgcagggcgacgtggttgggttggggaaggcattgtcctctgacaagatcgttgagccaaggcgtgcccccttgattcctggcatggaggctgtcaagagggctgccattcaggccggtgcttttggctgtaccatcagcggcgccggccctaccgccgtcgccgtcattgacgacgagcaaattggacacctcattgccaaacacatgattgacgcttttctccatgaaggcaatttgaaggcttctgcatatgtcaagcagcttgatcgccttggtgctagacgcattccaaattgaaccttctcttctctatctctatggtacgcttcacttctctaccgcttgttttatacttttacttgcttctgttcttcctaatgctatatgattttgcccaattcttcacttttctccaaccgatattcatacgacaaccaaggccttttctaatcttctttattattgctactttttttaactagccttatgatttcacaaggtctaccttataaattcattattacttctttcttctcatctcaacccccattcatttcttttctaagcttcttgaaattgattgtgattttctaattaaatgcatctcacggccttttcttattcgtatatatgtttttaacaaacaacatggttggttgacaattttgtatcagctactgaattctaatttattatgcttgccagagagagacttgtagatttcaagatccggatttcttccaacttgctcgtaacaccctaagtgctgaccgcacacatgtatttgaaatttgatctgatcaatgaagcagcattctagtgtggaggtctgaataaaaagagaaacattaaaaccaagctgggagctctgtttgggtggtggaaatttaaatagatgaataattatgaaaagacctagatcaggtcagtgttatggtgaactcaaaagcatgttttagattttctttgcttttgttttgctacttgagttgacaaagctcaaaaagaagtcatttttagtcttttcttgtttcattatgctagttaatcttagcttttgaatagcatgtattgttccttaatatttctctttatcatgtcactatcaatgttttctaattctttcttggttaatctaagagtttatgtggatggaggctttcatcacggatttcaattcgaaagctcgttcctaggttatatgtatggttgctcaaagaaccattgttttatgatgagctgaagatcgatcattgtttatttgttaccgcgttttccttctgttttctttgaataagtttgaaaaagaatctgtgcactttttcctacccttgtttgtattaaagattttgttgaacttactgtatttgaacattgaaggaagaaaaaggtatatgtaaacattatctaattttacctttgttaaactaggtcatcttctaacgaataggtagtcatcacattaattctcaattcgtttttactaaattagacttttacaaaattataatattattgcttaaaaaaaattactatcaaattacttagaaatttaaaatatcactttattcttttttttcaaatggttaaattaataacaccaaatttagtgattattttaaatttttatgaaatgaatttgacaacaaagaaataaaggattagtatcatgatcttaatacatgttaaattaagatgttttaaagaattttttacatcttggtaaaactttcgaatttattttttctctcaaataaagtgtttccaaatactagaaatcaatttggtaacaaaaatgaaaataaaacatcataatatttgaagggtcgaattctagatgtacagtctaaaacaactatataaacatatacgattttattttaaaaaaatgtaatggctttttccctcatatttaaaactattttatatttatcgtatatgtttacacaactataagcatgtgtaatacagtacaatttaattttgacgttacgtaacatgctttatacattctgcagtcaaattagaaacatgtaactttcaaataattaaatgtaaaaatcaaattttgttattaatataacaataacactataaaaaaaaatattgacaacatatcaaaattaaattataatcagtaatacttttttttgttataatttcattttaaattttattaactattaaatcttttcatcgggtttggtgtcaagtgcgatccgatgcttagtttggctcgatgtttggtgtaagtgtagtccaatacttagtttggctaggtgttcaatattaaatttggtttggtccttagtttggctaggtgtctatttagtctgatgcttagtttgattaggtgctcaatatctagtttgatctggtgcttagtttgacaaggtgtttagtgtcaagtttggctcgatgcttactttagttaaatgttcaatgttaagtttgacttatcctatatttggttagatggaagaaaaataaggaaggaaggaaaattttaaaatttgaattggaaagaaaatgaaaagaagaaaatttttaaattttttattaaaaaataatttttcctttcattttctatctaaacaaacataagaaaatatttcgttagtcgtattttctttcttctcgtttactctcttatcaaacgaatccttaatatttggttggcttggtgtttgatgtcaagtttgatcttgtgcttaattagtttgatatttcatgtcaaaatagattcgatgtttaatttgactaggtgtctaatgcttggttttaattcattaaaataataacatattcaaaacatttataatacttaacacaatttccgattatattactttcgattctctgtatatataaacaaataccaagtttatttatatactagaaataattatccaatttatcaagatcaatataagtagttaaattagataattttaattaatatcaagaattttgaaaaaaaaatactcataaaattaacttatttaagaattagttagatataataacactatttataataaaaaaaagtgatcttcatttcacaatgaatcaaggatataaaagaaaattactcattaatacattttaaagtgattatatgtttttttttataattttgtcaaaaattaaaaatgtttttttataattaaggaaaaaaatactacctttcttataaaaaggatttaacattgactataatttctatggtagacactactcaccttaaaattttccgttcctatttttgttataccaaaaattcctactttccctaacatctctgccgcataaaacaagatttaaaaatgaacgtttatctaatttctatgtataaaccctcgttttacttcctgacattatgtatgtctaaaatttaacttcacaaaactataattttataaaatactatattttaatattttcttcataatattttgcactaacgctaaggactaaaataagtattattaaaaaaagaaaaaaaaaagtaaataacattttataaagtcaataaataagggttatgaaatcaaattcgaatgttatagtagatgcttataattttattgactaacgagtttcctttggactttctcatttctcaaatcccaaatcccagcccacgatgaaggtgcctcaagaggaaacaaaacaagaaatccatagattgaaaataattttatattaaaaaagatccaatgggtcgtatgtaaagtcaggtcttattggcaacttgagcttgctttgccccgacagagaagaactcattgataacttccagtggcatgcccttggtttctggaacttttaagaagacaaacacccaagctatgatgcaaacaaccgcatacataccaaaaacaccaccaaggcccacagaattaagcataactgggagcgtgtaggtgactatgatgtcacatatccaaaatgtaagtgcacatatagccatgcatagaccacgaactcgagtagggaagatctctgaacaaaggatattaggaattggcccaaagcccatgacgaaacaacagaaatagacaataacacttgaagttgagataaaagcttttatagtactgtccaattccacaagactccctattactaatatgagaagtgatactatcaagacggggattgtagtcagcagcaaggttctgaataaataaataaaaatagaaaaatgtcaccaatgagtactgcagattgaatgaacaaaaacaagcaatgaagaaatatacacaacaaggggttaagaaaagcaacaaaaggagaagataactcacaaatatcaaatatttaagttctgaatcttcaaatactttccaaattataaaggttacaatttccagaattatcgcaaatactttcatataggaacttacaaataatagaaaacaaaacaccgtctccaccaggaccaccacaaccaagccatattcactaggtggagtcaatgtatatggatcattcaacaccactgagctaaatcaaaaaccaaaactaaaaaaaagaaatgaaaagcaagctgcttttttttttctaatggcttctcctaatgttttcctaagttttactttgtcttttaattagagcacttcaattcgatcaacttttctcattggatccttcattgatcttcgcacaaactagacgagtttccattatcctatctatagatgctaacttcaacattcccttggatataaaaacattcctaaatcctaatcttgtcctttctttgtcagctcattcacctcagcaatctcatctacaacacacttagtttcagctcatttactgatcatgtagaatcgttgatcttattactgtttgatatcattttcctttagtttgagagcactttgcaatagtagtaatttcaaacccaatttgttattgaataccaccctaaattgcaaaatattctagcaaagaacatacagggaaaatatgcaatggaaacagtatgtccatgagaaaatcatctccaggatacatccacctattgaaacaaatcttaccatttaagtagaagccaacaaaaaatgataagagaaagattcataccttctgccagatatatccatgagcctcatggccacagctatacagggtaacatcaacaaggttgtcacactgctaataagaaaagacgcagaagtagaaccgaggcccaggtttgaaagaagataaccaacacctgcctgctcaagaatttgaggtgtatagtagagcaccccatttataccagagaactgcgatgtttaagaggagttagatgacagtcagacatagctttttactaggtacaatgggctaatgaatagatcacctactgaatgagttttgagatttaaaaaatgttctaatatgtctaaatagttctgacaatttcatcaaagttagattaacagaagtttcaaaaaatgtcattacctgttgaagaatttgaatccccacccccacaatcagtgcatgcttcaccccaggctcaaaaaggtcactccaactcggcccttttgcagctgtttgggatggatgaatcatggctggtccaactggctgctgatgcataagctccttgttgtaaagggctgactgactcactagagcggcagcctggacaatctcaccatctgttagtgtgggcgcatcaccgcctggaagtgaaatgagagacccacgtctagatccaggaccaccttcttggtgtaaatatattctcttgaaaacaccttctgtttcagaccatttccatgctagctgccatccaccaccaatccctgagtttccagcatgttctccttgcaaaagactaccttgcctcatgcttccctgggcaggagcaggcatgtccctttccacacttgttgcttgacgtgagatcaatggactctgcaaattgtcatcagagtcgtccgcggcagcagcatcagatacataatcatcaccctctctggcaatgctttcttcatcccaatcttcattcctaggttgatttcccccaacactaaacatgcttccaaagtgtgggaaaagtgcgcttcctgtttctgggagcttctcatggacactaccaaagagcttcactagagggtccactagagcactttgatttgccatgcttcccttccgagatacaaggccaatggaactttgtccagtgacaggtttggcaatccaggattgaccttctgctgtcccatacaatttgatctgctcagcatcactgaattcattggctggaccaattatgtactcttctatagcggtatcacccccaactccaagaccctcaactagtaaagccatctcacctgatcatatccaagaacaattaccatccaaatcaagggcaagtaaacaagaactgatgaaatcaaatcaaataaatgcataaccaaccagcgacatcttgtctgctgcgaagtcgttgcaaaaccttcttggcctctagcatccggcctttgctgacaagccatcttggagattcaggcaagaagaatagtgtgagtgcaaaataaatgagagagggaattgaaagaacacccaacatgagtctccagtttggggccttggtgagtgatatagcaaagaccatacagtaggaaaagaacattccagcagaaccagtgaactgcggaagagtatttagtaatcccctaatctcaggtggagctgtctcggatatgtaaagaggtaccaaggtgactgccaaaccaatgcctaatccatctaaaagccttgcaaagaggagaatgtaaacatttggagaccatagcatgaccagagaactaacaaaataaaggatagaggagatgatcaacataggacgccggcctagcaagtctgataagggtccagagcatgtcgtaacgacagtggctccaataagtgacatggccacaattagaccttctattgtgggttcactttgtaaattaaactccctctttatgtacaaaatagatcctgcatagcatagaaagccaattagacttggttgaatgttatcttaattggctaaccgaataaaaatatgacctgcaatggtggcattatcccatccttgcagcaagttgccgatagcagcagccacagcaacaagaacagctccgctcatgtttgttactgaaagattgaagatggatcacagttcacagatcggatccagaacgtaaagccatcttcatctctcctaataaaatcagtttgagttggaagtttcaactttcaagaataatatactgcataaaaggacatagaacaaaagtataataataaagttggggccagggcaggagggtgatctttcctttctaaaattattcactgaactgattgatattgggcgtagctagcatagcggcacagtattagtatatactactacaacaagtctacaactacctcgactcggcaaaacaagacaagaaaagaaaaatgatgtaaaacaaaacaagtctacaactacctcgactcaacaaaacaagacaagacaagaaaaatgatgtaagcgatcctattcctatgtgccggctaagctaaaaggtagattataagtgaatgaatgactcccgtggctgtggctccctttttctttaaaatctcatccaaatttgcttacatgtcaaagaatcgccattcacaatgagtgttgttacgaaatgctttttattattctattgattaaatgtcaatttttaaaaacaaaattggcggaattcatgggatatgttctctctcttccattttttggtatttgtttccctaggttattttccttatttctcctctattctctctagctcactatctctttttataccttgcctatacattggccggccacattataattctaacaaagtcttttggatctttatgtgcatgtcctttaagtatggacattagaggtttgtcaaacctatggtagtgctaactttcatgatgtttttttagtataaacacttgagatttataaatcatatcttgttcttaaatgaatgaaattcgtttgagaattcaatggtgatgatggtgctcatgtcctgttggaacgagttatgggttagttttctttcccaatctaatattttttttgaaagagttaaaataagttgttagtctcttaaaatatattgaaatgctaattttagtccttatgagtttttttttatgtttttagtccttgccatttaacaaaaacgtgtttttagtcttcaatgagaaattaaagatacatcagttttaataaatataaatattaaaaacgtataaaatttgtaaagagtgtaaaattaaattttagaatattttgagacattttttcctttataaaatgtaaatgtaaattgtatagttgtgtaaaaatagattccacgattttagaacaatatctaacatagatgactgctgtatctcctaaagtcaacgtgctaactaatcaatatgaaaataagaaacattttccattacttggctgcaataactttaaatatcacgttaaaatatagattgatattttactaaatatattctcaattctggtaaatagaagtgttcaaatttttatttaaaaaatcatcctgcttttaatctctcatttatgcattgaaataaggagtggtgctgtaatctgagaaaaaaattggtgaagaatggttttgaccttttaaaatactcataggtattttttggaaataaaatttagaatttttagatagacggtgtagttagtaaaatagggaatcaaaaggtaagtttcgtctaaagctttgataaagatttggtttcttgttttgggcccctttgatctcggatgcattgaattgaaccaaaaagaaaaaagaaaggaaatgaaaaagaaagccgcgtgatatttaattgaaaattctacagagagagagagagagaagtgggcgtagctggtcagcactaacatccgatgtttctcggcaggagccaatacaaaaattacaataccaccaccaatccaatcatcctaaaattaaccagaaataaaaaatagaaataattttggaaactaattttgtggagatctgtcggagaagaaagaagcgaaagttattcctctttccattcgtcgttcaccttcacttctggtacgcttatttcgtaattctttattgttgtattgcattcttttctgctgggtctgggtgggtgttgaaagattatagattagatgatgtgatgtgaaagaaatgaatgaatagtttttttggattgatttgtttgtgaggtgagcgcaacagagagagagagagagagagagagagagagagagaaagagagagagagagagagagaaagagcagagcagaggggaagaagctgatgagaggagatcgttggatgaatatataatataaattggtttgtttgatgggcaacacatgccgcggatctttgaaagggaaatatattcagggcttcagccagcccgaagaccattccaagcactccaccacccattctgatccctcctcaaccaagcagcaagaaaacaacaacaacaacaacaacaacaacaacagcaatcttcccttcaacgccaagagagaagccatcatgcgccgcggcctcgacaaccaagcctattatgtcttaggccataagactcccaacattcgtgatctatacactcttggtcgtaaattgggacagggccaatttggcaccacttatttatgcaccgagaattctacctccattgaatatgcctgcaaatccatctccaaaaggaagttgatttccaaggaggacctcgaggacgttagaagggaaattcagataatgcaccatttagctggtcacaagaacattgtcaccatcaagggtgcttatgaggatcctctctatgttcatattgtcatggagctttgttccgggggtgagttgtttgatcgcatcatccagaggggccactataccgagaggaaggccgcggagttgaccaaaattattgttggggttgttgaggcttgccattcccttggggtcatgcatagagatctcaagcctgaaaactttctcttggtcaacaaagatgatgatttctctcttaaagcaattgactttggcctctctgttttcttcaaacccggtcggtaacaaacaactctgcttttctctttatatcttcttttaagaacaacattacaatattttattgagatacatttgtattcccattaggattttagggaacaccatttaatactaattagtgttgtttaaatattcatttaacctttgcctcaggtcaagttttcactgatgtagtcggcagtccgtactatgttgctcctgaggttctcctcaagcattatgggcctgaagcagatgtgtggacagctggtgtcatactgtacatattgcttagtggcgtgcccccattttgggcaggtatatcttactgcctacactcttttgatttcctgtccttcatctgtttcatcactgaaagttttgtcctttttggagttcagagacccagcagggtatatttgatgcagtattgaagggacatatagattttgactcagatccttggcctttaatatctgacagtggaaaagatctgattagaaagatgctgtgttctcagccttcagaacggttgactgctcatcaagtgttatgtatgttcttccttttttttttttttttttaacgataattactatgagcaaggaccaccctcatatcaaaagcatagttgttttgcccttttgcactagtagctaagtcgttatggttactcagtggatgttattatagatgtaattgagggactgagcattagaaattggcttttcctgtgctactcatacattcaaagttatcttcattattaaagatgtaataggtgattaaagtctcactggcgttgtggccgttgccacatctatagcagactcacccaggaagaaatagtcctatctaaattaatagttagctggatgttgatgtttcctcaaaagcaagttccagcttaacttccttaaggattaaactttgtaaatattcaaaatattgtgtttcaatgtgttgtctgacaatattacttgtgtcatttgcctgtttaggtcatccttggatatgtgagaatggagttgcccctgacagatcactggatcctgctgttctttctcgtctcaaacagttttctgcaatgaataagctaaagaagatggctctgcgagtaagtgaagctaattaaaaaaaaaaaaaaaaaacattgtatcccattgcccagagactcctcgctatgtgaaggtaagggggagggatattgtaatattatatgcagccttacccttacatatgcaaagagcttgtttctgaattcgaactcatgaccaacaaatcatcaagatctaactttaccgctgtgtcagggctcgttctctaagtgaagctaattgatgaataaatatagattatgtatgaatgtagctcatacgttgttatgaaaaagataatggattccatacatgatatgtaaagtgctattgttgtctttgtggagtcaagcacttcttggatgccaaatgaacctcactttattgggcttccacacttgccctttgttttcacttctccttcatctattatccttttgcttgtctgaaactatgtaaccgtagttataattgcttattatactaattttttaggtgattgctgaaagtctatccgaagaggagattgctggtttgagagaaatgtttcaggctatggatactgataacagtggtgcaatcactttcgatgaactcaaagctggtctaagaagatatgggtctacccttaaggatatagaaatacgtgatcttatggaagcggtaggttgttggttctgcgaaaagtttcttttttgtatttcgtgtttatacttcctattttatttagttattatttttaaatataatattttaaatttccttatatgcgaaagccgggggttgacattaggcatcacattagtgaaaaccagggactattcagtcatcttttacaggcattactccatttttcttttgagccacatcctgtattcgtgttaaataatctttgaacatgtttcattcacagctaaaatgttttgagttgtttcaggctgatgtggacaaaagtggaaccatagattatggggagtttattgctgcaactgttcatctcaacaaactagagcgtgaagaacatcttattgcagcattccaatattttgacaaggatggtagtggctacattacagttgatgaacttcaacaagcttgtgcagaacataacatgactgatgcttttcttgaagatattattagagaagttgatcaagataatgtaagttgtttaacctgtgctaaacattcacataggaaatccttgtaggctgttagaagatcttacagtatagtaatatatatcctcattaaaagactgctcttttagtcttcaatttttctgtaatatgtacttcaataacttaaatggtttttagtttgaaatatagaatgttctttggttaaagaatgcttacatgttttaagctatattaatttgcatttatcctgcattaactggagtttcgtttcaaagctacaagaattatgcattaggaagttaggacctatgtttgatctatccattaaacgttttctgatcacagattgtgaaaaacaattaattaatcaaaactatatcatgccttaaatacactttaaatatcaaatgcctgaattctaataatttgtcaagcatgattctttgtcgcctatcaataatgaattgaatttagttcctggaccatcttcttgtgcagttatgcttcatgattatgtttatatcttttgttttaggatggaaggattgattatggtgaatttgctgccatgatgcaaaaaggcaacgctggaattggtaggaggactatgcgcaacagtctgaatttaagcatgagagatgcaccaagtgctcaatagcttacgattgtgctcattatgtacaggtacttttggctttgggtaaaatagaacttttatcccctgtaagaaatactatttgcccactttataatttatattcttatgaatttttaagatgtagaggtcaaaaggcatcacaaatggtatgtcttgtaatcaccaacatacttctaatattatgtggtaggccatctctagtggttggaatagacatataggcaatagatgttagtttctcactcttggaagttaaagttccaaataattgtacacaagaagtcatcatgaacctaagaacccgaaatgatttgattgaagttcagttatcacttcatgacatttcaagccttatttcccaatttatataggtcccatttgcgtatgtacccaatattttattgggatctgctcacattttagcatcagttattgtaaagcatcctgtgcagatggctgttgaattgaagttgaagtgtcccagattttgttgtgtctgcttgttctttagcagatacttctagacttgattttattcttctaatgatggcccatcaaatctactgaataagttgagttattcattggattcttgctccccagaagagggtaatgacagtttggaatacatgttagagtcgtactatcaacccacaggatattggtggtcctctatggagctgccttgtctatagcatattctttgtaatatgttggtgtatgatttcctgatgaaaaaaaaatcattttgaggttttaggttagcttgagttatggaagtataaactgaagaaggcagcatatctgcatacatttggaggtgtgcgtgagccaactggctgatgaaccttttgcaattttatatacagtagtagtagtagtagtagttatataaaaagatgtaaccccgagaccaaacttagggtgggggtgggactcccgttaagcacatctttgtaaatatatatcgttccaatcatagatcttggttctgcatcttgaataatgcatttagagttgaatctagatttaagcagtaattccaacaaggtgtgtcttgcatgatagtttatatcctgcagtttgccaaaacgagtattagctgaatatctgttgactttttattactctcattgttaacgtcactcttcctgtattctggaatgcaattttggcaggttgtatgcagcaaagccaaaaagagaaaaataaagtaaaaatctttacaaaaaattgttcatacttgctgaccggtcctatctcggaagaacaatcaggattgtgggtgctcacgcatgaggattcatcaaatgttacatttatgtgctgtatgagtggaaaaattgtttctcgctttgtaaaccttagtgttgggtgttacagctacttcgagttggtcttctatttttctgtgctttcatgtaggggcattctgtctatagtttagtagaaggattttgatctttcaagtacttgatttcacggatgtaaagtttcacacgcatgatatgatgtattgggcgtactaagaagcctttgtggagtatgatgcattgtgttaaagtgacattgctgaagcatattatttcccagctggcttttctttccctaaacaaatacgtattattctagctttttttttatagctaaagcttactttaaagaaagttcaaaataaaagcttttaaaatagagtaaaattctttaaaaaattaagcagtttttttttttttataaaagaaaaaggggggaattagcttttaaaaaatgtcaagtgaattagtttttttaaaataagttgtactgcttatttttctcatgaactacttatttttagtctctttcgctttctcatgaactaattaatgtggaaaaagaaatgaatttagtatcaaacaacgtgttagaaaaagttggtccaaacattcttcaataaataaaaaaatagcagttatttaatttaatttgatgttaactgtttgaactattgatcaaatattaccttcggctaaagaaacaaatggttatttttttatattaattataagaaatatataatcaattttaaattattagtggctaattttcttttacatccttaataaatgaggtctattagtaagatatcactcattttcaatgaaatggatgtatttaattagatattaataatataacttattcttactggttgaaaaaaatatgttggattatgagtagtgtaaatatatctaatcatcatttacggatatttttggaatacaatttgaatgtatgttagtattaattaaagataactaatataatcactttttttttatattttattttgatgatttggttatatgttgtttatgtctaggattagaagaggccatgtttcgtttagttctatttataaggttcaaattataagtgatattatattctttttattttaagatttaatttataatgtttattatattaattatttttatttaaaaatagcttgtttttaaggcacaattttaaatagagaaaaaaaatattaatgataatgatagaattgaaaaaaaaaataaaaaaaatatttattattatcaattaaattaattatttttcttaatatcaataaattaattaattaaataaaactagatcaatattgaaatgaacaattatcattatttgtttctattgactaccaatactaaaacttggttatcaaactctagttttaaatggtaaaatcatacgattttgtgagtctacacactcctaacgagttgaatcgcacatagaatcgttttctggtagactcggagtaaactcgctagaatcggatcagacttggtagaattagaccaaactcgatagaattgtacgattttacaattttgtgttttttaatatttgtttttgtttagtttagactttatactttaattaagttatgaacttcaattttttatattatttataggttcatacaaagaggagaaaccgcttgcattaaaagaatatgaatgacttagtttatgtgatgtataacttgaatctgaaaagtagacaaataagaaaaaaatgttgttcttccatttgaagatatggaatgtgatgatgagtggataacataagagggagatatatttttgatgaagacaatgttcaagttgagcaacctctaggtgaaagtcgtagtggaagcaatattgacgtggttggaggaagaagtttaagtgattcaactttagatacatttgatattgacaatttgattttgaatgacaatgttgaagattacttctcaatcgaggaagaacttgaagatgatggagatgaagatgatgatggtggtggtgatattggaaatgacttaattacaagattgatgaacatttgaattatttatgttttttaaatgcttttatttgaagaacttatgttttatgttttgtatgatatgaatttatgtttgattgggtgtgaattatattattttattgaattattgttaaaatttgttattttgatttattttagaattaaaatatttaattatgattttatatataagaatattaatatatatttttatattgagtaaactattattagtttacgaatcgattttattagtcagtttatgaaaccctcccaaaattaagtagaatggtgaattccagtttatgaaaccctcccaaatttaagtagaatggtgaattcgacaatattactaacacagctatttcaacaaactattactcacctatttcaacaaactatccctcgatctctatcaccttctaatcctgcatgcatcctaatgtaccacaatcttcgatgtgaacccgaatttgcgacaaattgatccacagggaagtggaccaaaataatggtctctcatcgtggcagtaagccaataacaaatcgtcccaataagaattctccttcccgtttgttagtggcggatctaggaccctgattagtggggacaatttatttaaaaaataaaaattgataattatcattattatatgggatagttaaattcaaacacgaatataagaggaacaaaatataaagttttaagataaatatttgtattttattaaaataagaggatggatttacttagtcttacatgtaaactggtaaggaggttcaaatacataaaattaaggggttcaaaatataaaattatggggtgcaaaatatgatatttttttcattttattaaaataagatgatatatttacttactcttacatgtaaacttgtaaggagatttgaatacataaaattagagagtgcaaaatataaaattatgggatgtaaaatataatattttaagacaaatactagtaatttattgaaacgaggggatgcatctgcccactctcaattacgtagatccgccggtgctgattgtgtcgccctgttcctacccttctctttctcacctccatgataaaaaaaaaaaaaaaagacattaaaattgtagcacaagccacaaagtgggttgtcacacatggactaccacgacccatcagctgccactattcgatgcagttgagctccacaagttgtccttctataaggatttgtagctttgatatgcatgctcacatcatatcatgttgcttttgcaaatgaagcaacaaaacccccaaatcacaaaatttcttccccaccctatattttacaaaggaccaacctgcaattttcacagaattgagaaacacgactggttcaaatgttccacgggttgccatcattaatttaggtcacacaatactttttagtttaatatctatgtcccattcacctaaacttacattttcaatcaattttaaattattatcgatataatttttaaaataattatcatcaaaattaataaatttaatatattattatatgattagatgataaagtgaaactttttatattctaattttatatactatttactcatacttttattattaaataaaaattatttattgctaaattgttgtaactacatgaaatcttaaccattagcttattttaatatttgaaaattttaaaatataaaatattaaaaaaaatatgtataaatggtgatgagatttgtaaattcggcactttccagttttttctaactggagagatccatgtcggtgactatttaagaagatcatgaacaatcatgtgtggggacattgaggtccaaagtaaaaaatgaatatgataaattttattgatttttataataattattttaaataattatattaatgataattttgtataagctcataatataaaagaaaaattaaagtgaatatttgttgatatttaatctaataatagtatcgatttatttatactttatgaaaactttaaattcaacatataaattgataaaaattattctcgataaaaaaattattgtgtacatttttactaaatttgatacttttgtcatttaatcttatgttttttttaaataatctgttaaacaaaaacgttattttctttctttacactttctaatcaaatatatataaaaaaaattaagcatttctttctattttttttaccatacctacaaaaacaatataaaaatgcactcattttcttacatatttgtttttacgttacttgtttctcaccgatttatcttctctacatgattttcttccttaccgccaactgtcaaacgaagcattgcatgtaggatttagctatatttgttatttagaaagaaaaaacagaaaataaaagaagaaattgtgcaccgacacaaagcaataataatggtgttcggtaacatggtggtggaaccgtggaaggaagttagcttaattatattataaccgcgacgtaaaacggcatcagacgatgtgtaatgaaaaaggagaaaataggaggacgtgggagaggaaacttcaatctcacggcaacaagttcagaattcagcaatcattatttatgaattacttgggcagggcaggggattctgaaacagaaaaatggcaggttctacattcaccatagaatacaactataagataatacagtatgcaacaatcaccctataaataagatgttcaattgtttccattaggcaacaaatttaattataacaatccacaattaatagaatatgcacgtaattaactgagtacaggaaacaaattaacatgaagaatgaattgtacataaaattggcttacgtaatgatttccacggtggatctgaaataaagagtaaattatttgaaggaagcattgagaaatgtggagggaattatgagaagagttgaggggtggaactgtggtaggttttgggaagagtggcgtgatcagaagtagagatgaaccttctgatctcagagcgaagcttatagaaaacatgtctccaagtgcccatgttgtgggagccaaggagctttgtttcctggtcgttaatttcgagatctgtggcaaagatgagcttcctggagaggatccaggcccagctccagtcccaccatgtccttgcatagtcacccatggatgagagggacttggatctgggaaatgaccatgttgggctgtcttggatcttcagagacagcgaagaaagacgtcttcgaaggcctccttcctctgaacgcgacgacactggcagcgatgatgcctttgtacacccaaacattatgctctgctgtttgctcaaagctatgttttcggagaaaatatatcatatcataagagtggtgaaatggaacgtttacagctctaccacagcctgttttattccttctgctgggtcagtcaccattcgccatttctctctctccacccattgccttcggttcggtgatgtgttgctatttaaactggacttgtctgctctctcattgaatccaagacgctttggtgaggtgtttttgtgccaaattcaatagtagatccaaatgcttcattggttgccaatgtaattgtcggctcttctctcacgtgttttttgttgtaataatgctccattcaaatactttctactttttgcttttatatattgcaaaaacattttctaaattttttaagtcatatattcttcattaagaatatgaacgctcagagaattttacctccttaattaagtgagtttatttgacttgattcaaagtaaaaaaatataaaagtttatctcattttttagtggattagagtataaaagaaaaaatagagataaaaaatgatagatgtgatgagtgatataataagaaaacaaaatttaaaaataatttgaaataaaataaagagaaaataaatatatgtttataagtattctactttaattttgtgtaccaagaaaaaagttaaattaatcaaggtctaataatgttgcttctaaatgctaaggtcttaaacataaaaaaaaaaaaaaaaaaacatttggacctaataaaaacaaaattcatcataatattcctatcatgatattcacatttgtctttttattcaccaactatttataaaatatattctttgaatctctgaattttagggggcgcttacttgcagctttgttttctgtttttattttttattttcaccctttatttataaaactgttaatttggttttaatttgttttcaaaggtttgtacagaaaacgttgaaaataatttgttgttttctaagattctaagattatatttcttttaagattgttcccctaatctcctcgtgaacaccaactttaatggatccctagaaatcctatattgtttgttgttacaatgaattcaaaattcaagaaaatataggtattaccctccttgagtattgactaccacttttcaacatcatattttttcaccgcaacttgtattttatcttcctacgtcatgaacaaattaaattcaataaacaattatcttccatttgattttgaacttaagcaatataagactaccttcacatccatgatattcatatccatcttcacatccatgatattcattttcatcattgctgatttatgagatttctgcacatgccaaatactatttattcttattgccaacttccaagtctctcgtgccattaatctctccaatgaagttgactttatacaccatttgaacgagattaagtatattttctaaataacaagtttgttggactccattcataaatatttttttttaaaaataagtaaaaactatatagttgaaaacttaactggcaaaatatggcatcaaatcatgctatgtactataaaattaatataacaatgatttgttcatgacttaactcatgaaagattataatattatgcataaatatgtacaaaaaaccatgattagcgaggaaaaagaaatggataaacaaaatttatatgcaggaaaaaaaatcattataatttgtcaaagcatataagaaaccaacttagacattacaatatgatggtgaacttaagcaatataagataaaaaaaatgtgatagtataattataaataaatttatgggtaaataaccattttcgtccctgaattgtaagataacaaaaattagagttacactgaagttgaattttaccaagtcaactacaatttaccatggtgtgtaaagattaggaagttgttccttgaaacaatttgctattgagttaagtcatgcatttgtaatataatatgcatgtgcaagtctcatctaaaaccaaagggctactatgcctagttgctgatagatgcgtttctgtattttccaaggtagtagtatcaacttgatagtggatcagtaaaagttaccagtttctaatacaaggtttgaggaccactaatggattaattcaaagctcgttaaattgccatggcaaatggatgcctacaattaaatccatgtaggtacgtatcaaaagcaaaatagttgtttcttaatttccacacaattttcattaaagcatttattataactctttaaatgttgatgaatcacgcgtttattgttttaacaaggtcaatgttttatttaaggtgtgaaaaggtcatccaaattttctctttgctaattgctatatagtatttttattttattttctagcatgctgcaaatatttgtgaaagaagttggataaaaatatgcacttgccttatatattagtaatattacctaaaactatgaatgttaatatgtaaagctcagatatattagtaactctatcatccttataccattgccttattaatcacatctttgttcttgataaaaaaaaattatttctaattcaaaatttggtatttattctcaggttattcaatgtgaaaacgtaaaggtttagctttctctcagtgacactagtggctcaaattttggtatttatttttaggttattcccattgacataatctatcaaggaagaagtctctgattattgccttgtaattttcctgttacacaagttgtgaatctctagtttagtaatggaggattatcagatgttttgcctgtgtatgtcattgacaatttacttgttgtacatcctgttcatatgtagtgcaacctactctaaccaaacacgacattgccactgaatcaacgttattttaggcttaacattgttcatcagcattcacttttttttgtaggctattcgtcttatatttgctctttcttcatcttcctttccctcattaagtggtttttggaagttgttgtcttgtctctaaattgagaacaatttttctatattgaggttttacaaacttgatgtttattgttattaacatatggaagcaatgacaatactaattcaatagatttgtgttgtaatttatatttacttagctttctataacaactttaatgctttattatctcttgtgcaacgttattttacttattttttttttttttttacttttttcttttaagatacttttttattatgttatttatttttatcatatatttttcaatcaatgtaaaactctgttgttaggagaacaaaaatgcaagtgcaaggagtgcaagggcactcctattgtgcacaatgctaaccatttaagtatatcacattggttggtctaaaaccaatgttgaatgtgctataccacattggttttgatcgaaaaccgatgttataaaggcacattcaacatcgattttggtcaaaatcgatgtggtttaacacattcaacatcgattttgcaaaaaattgatgttgtatacgattttcaacattgattttttcagaatcgatgtagaaaacacttcaaaatacataattttggcaacatttttacattgatttcagctaaccgatgtagataatgattttcaacgtcgattttaaatttgacattaaaaatgtctactttcaatgacagtttaaatattggttctaaaattgatattgaaattcctctataaccgatattaaaacccttttatgtaatattcaatgtttgtgattttaaatgatagtacaaatattgtggaaaacaagcaaaagttagaaaaatctagtacgtgcaaaattaagatagatgaaatatgtgttgaagtgtatgatgtatataatctattatggcacaaacaatattaagtgttttttgctatgtataaagattatatttttccattttacccttgttattttttttataaaagataaaagaacaaaaaaagaaaagactaattaatcagtaaatgtctccaagaaagaaaaataagccattagcaagcttttaacaattttaccacaaaaacgcaaggaggcctgtgtactaaaagaaatgtcctaactaaatatcaaatatggttgaagattttagagggaaaaaatacatgcgagaaacatggataaataatatatatattaagaaaaaatatgattagcacgaaaaaatccatatcttaccaccgctttactctttgagttgatagccaaagggatattctaaataaataattaagggagggggacctacaacgaaggaagggggatactactaatgcttacttcaatcgctttctttatcttgtggtcaactgcaattgaaagattcgttcctattttaggattggggcggtgtccgcccactaatgtaaaaattggtcgagggagagacaaaagagaatttctttttgattgtgttccaggcttaagagttgaattagtcattgggattggtgtacaaacaagactaattgagatttgtaattagctataataaagaatacgctctttcgacagagaagtgaacgatttcgatctgcatataagaataaggataaatggagtatatacatgcgaatgaagtcaaaacatatatacatacaacaatattaaaagcgaatgaagccaaaacatatatacacacaacaatataaaaaaaaataagaggaaatttgcaaaagcataaatagaagaagaaatgaagcctaaggcacaaatagaatctacaaaaatgaagccaaagcatatatacacacaataatataaatagaagaagaaatttgcaaaaaaaataataataataagaggagttaattgttgtctatttaaaaaagtatttgaatgataatcaccagattgagaagaaatgtgaaggaaaatgaatttttcaaaggcacaaatagctcatagtaggaactagtaagaaagaaatgaaacgggaccatttttacacgttaatggttaacaagatagattaatgtgattttttaatggattaaaaaaaatgctattatgaagtattttttaacatggtcaaacaacataactctagttgtgataaaaaaagttagtttgtaaacattaaataaattagacaatgaattattaaatgaataaagtgaagtgttataaaataaaatagatgaatagtggtataaaaacatggaaaactaaaatgatcaacaattactaaaataagagtaaattatacaaatatttttatacttttataaaattacataaattttccttacttttttttacccttgcagtgatcttttaattgtttaaaaaatatacattgatattcctttatacattacatcattatgtgttgtaagagagttattgtaaatgtttaaagaaaaaaaaaggtaaaaattgtgtaattttatgataccaaagtcattagtgtatgtttggttttattttgtataattgattgagtagatttaattttggataaattttgacatatttgatttcattgaaaaaagttcaaaattaattatgaattaaaacaattttaaataacttttgtattggataaaaagatttatactaaattttactcctcacttaattttataataataatatacaaccataaacataattttaaaattaattttacaaaatcacttccatttaaaatcaattttttcaaaactcatctaattacacaaataatttaaaggcttaattgttatttttacctctaatttttttataatatattgtatatattatcccgaccatttttccattattaagcttaaaagttaaggataaaattaataaaaatataaaaaattaaaaataaaatttataataaaaaatttaataaaatacgtcaaattaatttattaaagataatttttttataaaaaaatataattaagtctaatttaatgtgatagtaaacttttgtttatgcatagcaaagagagatcagaaagagagcgtggccttataatatcataattggtgagcggccgagatctgttgccggtgcatcaaggaaagtaagagtttagagtttgaactctgtttatccaatgcacaaagcgtagatctctgtgatataatggaatacaggaaaatcaaagacgaggtgagtgttttttcgcatatttcttcaattaatagtacgattttgatgcattgttgttgtaggatgaagttagggatgcggacgttgaggacgttggaaaatcatttttgctgtcaggtagtggtatcgctatcgctcctccaggctgaataatggatagttgtgttgttttaatgtaacatccgtttcgtgtctcttccagtcccagataacgatttgacttccgagggagaaaccaaaattgacagccacagggagaaagtaaagtggaagcgcaagtatgacaacaattcacatataataagtgaaatacttacttgttgatttcttaattattatccctgttgcctgttggtataggtcagttgttacacttgcattgactgttcttactagttcgcaagccattctaatcgtttggtccaagagagctggcaagtatgagtatagtgtcactactgctaactttatggtgaggttatatcacatcgtcatatcctatacgctcattctgttatttctgcttttattatctttcataacttcaaacctaaacctgctttattactctttttgttataggtggagactttaaaatgtgctatatccctggtggccttgggaagaatatggaaaaaagacggtgtcaatgaggacaacaggtgatgccattttttgttttgtttagatttcttaaatactactatgtccgcaataatgaagagctgcaagtcagggaatatattaacattttaacagtgcattttatctttatttatggttgtgaacatttttaatccgatctttttgacatttttagaactggactaatttgactgttaattgcatttgtaaactcttgggcttccttattccctgaagaaataacctgtatatggctaattcataggaagaaattagttgtttactttgtgaatctgattgaaaatttaatacttcatcatatacaagtaatcacagttgcacttggtaatcaaaacatttggttatatggtcttacaaggtaactcttaaaaccaaaaactgtcttaatgtgattttgaactgtattccccatgactacaaaaccactattttttgatattttaattttgaaaaacagacaaacattcctttatatggtgtttattttatgtgtgttggggggagtgtctgaacagtgttctttaggtggagaggagttcataaggctagaacctatattgttaatagtgttgagtaggccaatgggttcacttaattttcccggtggtgtttatgtatttgcaacttcatcttttttattgaagctttattttttcccccttgttggtgtttttcttttaatctgggttcgcaacaattcacgcacattgcttaaccaattgagctagaaccccttgttggtgttatatatagaatgagtttaaataacttgataacttgatgtgtattgttccttggacataggttgactacaaccttggatgaagttatagtgtatcctattccagcagcactttaccttgtcaaaaatttgcttcaggttggtgatggatggttgtttgttatggtggcaatgggattgttctacaactttgttattgcaacagatatgttaatgctttctgaatctgattgtatttacttttcaatttacggcagtattacatctttgcatatgtagatgctccaggctatcaaatattaaagaactttaatattatcagtacgggtgtcctatacagaattatacttaagaaaaggtaagtcttttgttctctcttcttcaaatgcaaaaaaaaaaaaaaaattatcaattctcctttcgccatgagaactgtagtggaggatcaatgcaagtcgggtcctctgtatgccaaacttttatgtggacaaaaacgagaaggaaaagctccttccatcgtactttcacttgttttataactcattgtgttatgaaatgttctatgaacataattaattgttattattctttattttggatatttaatcattttaagcttaatgactgagaaatgttatttagttggactcattacataaccaaaattcattgttcgctgtttggcattgtgttcttgttacatttcaggttaagtgagattcagtgggctgcttttgttctactcgctgctgggtgcactacagcccagttgaattcgaagtaagaataatttaaggctgacatgtggccatcacttgtgtatttgtatgttcccatgactgttgtatagattttctctagtaataaacatgttaatgaaatttttatgtatagatgtaacaaacaaatgaaccataaatgataggttagtaatttagcaagtgtgactgctgaaaaatgtgtgtattacagtaacttctccttgcttgtatcatacataaatagtaggaatatacctgcgatctacacacaaaaggtattgcagaagttttacattttattgataattttttttttttttttttatatttatctggaaaaatttgtattgtgttttcagttctgatcatgttcttcaaactccctttcaaggttgggtgatggcaattgtgagttgttaacgtttgtggtgctttcacattaggagtataaagtaatataagctgaatttttggcttgaaactgatcatgatgaactttttgtttttaggtcatggctctcttgagtggttttgcaggagtatatactgaggtaattttagtttggagcagttacattaattcccttgaggtttcatgaaatggcactccactccaatctacagccaaaattattctctgttctgttgactactattgactgatggaatattctgcttaaaaattgttttagattcaaacgctttttgtattaagttgaaattatttatccaatctatctgaatttattaatgcttgagctaaatttgattaatcattggagatgtgccagtctgcttaaaataaggtttatgagctctattactatagcatcgagtaagatgtgttagctatcaattgtggcttagtagatttcttacataatttttggcaggctattataaaaaagcgtccttcacggaacataaatgttcagaacttctggttatatgtctttggcatgtgtttcaatgctgttgcaatgttggttcaagattttgatgcggtgatgaacaagtaattcgatctcttctttcagattttgactttgcagtttgttttgatctttgctcgctattttcttgtgttcatatatgaagaaaatcttttcatcaaatgggataactgataaggcctcaaattaggattattgtatgtaaatcttgaattatttattttatcttttcccatcttaataagtttgatatcagaatcttgatttcagatcagatctttattatattctttgggataattattagttaggattctctttatttttattttatcatttatgatcaattaggataattgttagggatatttttgtagcctatttaaatggcaaacttgattgaaatttaatcaaggagaaatattcagaaaaacttgtgttagtttaggaggggctcagtcaaggacgagtctgcttctttctttcactataggtcgacagaagtcttctatgtctaggcttgtgacttgatcctacgataaggttcataacaataacacataatatatgttgtttgatcatataagtcagtaccaagtattataaacaatcatatttccattgtagttataaagcctaaattgtcacgtcagtaatatatgccttatgtctttattcaggggattcttccatggatattcattcattacagttctcatgattttcaaccatgcactcaggtaaatgacgagctttataaaatttattgagggatggaagtttttccctaattactattcttgtgtatctagttgttggcaggggaatagccaaaaatttaatttaaggggggccaagacccaaaacataacttagtaaaaactaaataaataaattccacatacataacatatgcaggaaatttatatgtataactaatactttttagagtaaaagaaatacataattgggttgagtacaagaggtatacgcgaccatttaaatttaccgttgtttccctctttctctactttgttaaagtttttaaaccaactggtacaatttgtatgtgggttcacaatatgtttcttgattttattcattttgggttttacttgtcttcttgtaatctttccttaaaacttaaaaggatagaagtatggtgttcattttggatgttattcacttcaatgaaaagaaactcaatatgattctaacaaatgattaaattatgggaaataaagaggaatcaagatttgatcaagagtgaagaagaacgggaggaactgaggaaaatccaaattctcaaagaagaaaaccaagtggaggtagagtagggtagcgtgtctgagaagaaatagaacaactaacaggatagataattttttttccttttatggtagatagctaggagggacaaagatttttgtttaacaatataaatacactttaaaagcttgggggtgaccatggcccttgtgggtcaccccctccctccaccactagttgttgggatccagtctattgagatcccacatcgactatagatatggcaaaagtagagcttatacaggcttggacaattcttaggctttagtccaaattcaagacagggaggggaatttgttatgctgatttgacatatcagttgggagtagagtgggaatacaaggagtggctgcaaggcatgctggcgtaattttttttttttttttttttgttgacagaaaatagctttctcccagcagtccattctctggttgcatgcttgtatgagcttaggctcagttcttttgaaatggataagagtcgtgcactggcttctgtttttggtgttctattaatcaaccatttcccctcctttgtttggatgcttcttctgtttcttcctgaaatgaaaggttacttgagatgtggactgtggagtatgagcgacaaaaagatgaaacaacttttgatggttgatgaaactgtgaataagcaaatctcgggaaggttcatgtgccaattgcatgaaacaggctttatttcaactttatctttggtgatttccatattcaactgttgtcatttttaagctattttcctttaactcatcaagtcctctctctttctatgtgtctgtttctatctctttcactacacaaaaaatgtgaatatctcttttcaagcaaatactagtagaagttttcattattttattgttttacagttttgactttcttgttgatgtaatgtgtttacgtggttgtttctttttgcagtggaattgctgtatcaatggtaatgaaatatgctgacaacattgtgaaagtaagacttgggtttatgactgtgttatgatatttctaccatttagttgtattaatagaatttgaaactttcatgagtttaaattaagattatgggttttttttttttttttataattggaattattcatatgattaaacatgctacatctacaataactttttattattggtttgttcatatgatacactttttgttgtatgtctcatggtcacacatactgaatataaatatgaaattatgcaaaaaattgtggggttagagttatgtgcccttgcgggtatctcttgttggctagagtgtgtgatattgttactttgctgtagacccccactattctttacggacaaaacttaagtgatgctcattagatgtttgctctcaggttctacagttaaatgaaaaatatattaaaatttctatcatcactttactctgtccgatattattttatttcttttcttatcatcatacttgaaaagggagaaacgatttctgaattgcatgaggaaatcctgtgtttgagtatatagaatgtgatttacaatctctgaacacattatcatatattgattgtagaatctgagctcgcttaatgaactgcacacaagttttattctgtgcctagtatttagaagtagagctgcattatgatgattgatgaatgctttcatcaaatgtgatctatatgtgtgcttctgtttttcttggtttattcaaacgttatggcacccttacagccttactagctcaagcaaaaaacctttgaagtggaattcaaatttatgattaactttccaattgacacaggtgtattctacttcagttgcgatgcttcttacagcagttgtttctgtgttcctttttggcttccatctctccctcgccttcttcctgggcacagtgtaagttgctgcttattatatcatgattgtgcttgccgtgtcctatgttgtgtttttcttttccatgacccaagtattgcacatacatgaatacatcatactataccagcaactgaaattaaaatgttgatttttttagtacttttatggctttggctcttaatgataacttgtgttaaattttgaaatgcttcattttgatgtgcatgcctcggggcaatagcttttaatgcttcattttgtagtctcacgtaaattgctttatacccattttattttctcttgaataaaagtttgttaaattatgtttacagtgttgtctctgttgcaatttatctgcactctgctgggaagatacaaagataactatgacttctgtcttctgtttttcctatactggattttttttattcattgttgtttagccttgagcaaacgaatacatattagttcactgtaatagtgtgtgtatctcaacattcaacatggatagaaccaggcttacgttcgattgtctacattattcttcttgatgcgtgagatgtaaattccactagaagctcttgttggagttaaggacgttgccctgacctagcaattcaatagccttccctcgccccatcctaaattttgtgagttctaaaaaagtggggaaaacctatagtttgagcgatgtgactttgttgatcgaacctttgcaaatttgggaggttcttgtgcatgtgaactgatttcaaagtgatggccgaggacaatgctttttatgaagtgagtactttgccgcgtcagaaatattatacgagaagtgttttttttttaagataccagaaatgttagtaatatcctttttgatatattcttttgaatacacgctcaattatttactaaatttttggaaataattttttttaagagtcatttgttatttaatgagcattttttatgattttataattttaataaaaattaattaataattatttatcttagaaagttagaaagaatgtgttgttaatactcttaatgttatacttaggagtatttgtggatgagattgtattaaataacatattaaataattattaatttaatttcaaaattattttaaaaatgcatcaattagattctttctggccaattaaactaatgttgttagacgttcaacaccattgtcgttcacgtagtcctcatccatggtaacatgggttgttgtagttatacagtggccaagggaaggttgcacattttttgttcagatacgaagagagtgtgatgtgttttttgttcagatgtaaagggagggtggtgcggtttttgtttagatctgaagggactgttgaggttttgtacagatctgaaggaaaagtgtcgcgtttttgttcaaatctgaagggaggatggtgcggtggtccttcaatgccctcgccacattctctatcgtcacgtctgtctcgcttattctttctgcgtacatcaatgttgttcgttggaaactacgcacacatgtatgttgtgcaggacggattgtgcaacaccacctcctttggttgttccctccgcatcaaatccatcgatgacacatctcaccatcatagactccctcgtcatgccaccgccaacgaattctctaacctccgaatacaataattgtgattgtgcttgtgtattgtgagtttcaaattcaattccaaatttgtgggtttcagatttgatttcagaaaagggaaaaatattttatttttaaaataaaattaaagatagtgacgtcttttattggtaaatcaaacctctagaaatctcatcttaatggtattagttttaatttgatggaaatgactcgattctaagtatttttaaaaattagagaatctgattagagcagttgaaagtttaaaaaccgtgaacaaattggtaattaagccttaaataaataataaaatacatattaaacataaaaaacattaaaaattataatatcttgtttataagtcaatatataattaatagtagtataactctttaaatatgtacaaaaataaatttacacaactagataacttatcaataaatttacttaattagttacaaaaattatctttaattaaatatatatctcataaacaagttacgtgataatattataaatatagaaggaaaaaatatgtaaatgagtgatattataaatataaaaaacaattatttatatatgcataagttcaattttaatttggttagatcgaataattttttgtttgtttgtgaaaaaagagagaagtaatagagaaaaaacaagtaatagatataatgaataatatgataaaaaaaagttaagtgtaaaatttggattttgaaaaaattaagaaattattattatttaataagtaagcattcttcaaaaaaaattcatctattgtttatccgttccagcttttaaaagttattttcaattagagggggaaaaatgagttagtgtggcgtgggaagaagttggaatatcgtgagaaatggttggcttaggatgcatagcaggagtaggagttcaccccagctggcaccatgatcgagttcgaatccttgcttctaaatctgaagaactaacactaacaaggtggtggtcgtggtcgtggtcgttgtttccttctgcttctgcacacgagactcatctgtgtcgaattagggcgaggcgtccgtgttgtgtgcctgataataaagaagctggggctggaaaggaagaggaagaggaagaggaagaagtacaactactagagttagaatggaagctcctcaccagaaggattggcgattccggaataatatcttcatgcttggtcggtctcctcaccggcgtcgctgtcgtgctcttcaattatgctgtaagttgttattattatgctatacatagatagataaatactctctattatcataatatacttatatgtaacttcatgacatgtaataaggttcatgaaattcgtgatttgttctgggatgggattcccaatcgaggcgcctcatggctgagagaagcgcctattcagacaacatgggcacgtgtagtactagttccgacttttggaggcgttattgtgtctctgctaaacctccttcgtcaacgttttgattctgctgtccaagaagatcctttcctccaaactccatctgccaacctcaagtctgcttcccgccctttcttaaaggccatggcagcttctgttactctaggcaccggcaattccttgggtccagagggtcccagtgtcgatattggtacttccatcgccaaaggcctccgtcctttctttgacaatggaaatagttccggcagaatgctctcccttctcgctgctggatctgctgctggcctctctgccggtatctacacttacacgttacttttatcactttcctgggatccgattattttcttctctaatttatatttcttatcaggtttcaatgctgcggtcgctggttgttttttcgctgtcgagtctgtcttgtggccatcatctgcagatgcatctttaccacttacaaataatacttccatggtgatacttagtgctgtcatagcttctgtagtttctgagattggccttggctctcaacctgcctttaaagttcccgagtatgacttccggtcccctggtggtaagtcatcaacacatttttctttgagattatttatgacttgaccgcttcattctcttgctcttgttcattgctttgttcctttcttccctgtcaaatttcagcaaagtatatcaatacatgaagtgtttccatttatgtatgtgttaatatgtgtactgaattggtttaacaacgcacttgactaactgactgtgcctatcttgcaaaaatacaactcagaatggctgtacctggacatttccttacaaacttggttaaatctagtcaagtataataatacatggaagcctctagtaagctagtcccttttctcctacaatgaagatttaagcagccaaatgcaagtaaattatacctttagggtgtcatattggatcattgaactacttgggcataaattccatagtatggccattttacttatatctttctgcttcaatacataacggttcatcatcaacgtggtctctgactatgctcatcttgtcactatggtcatcattattgacaattcttctgctaggcaagccaatactaatgctttttcacaattactcctttttgactgctgaaaactttcctttattaccaacattgctgcggcaactgctgctgtttttgttctaattgatttgcgaattgtctgtactgctggcattcaaaatctttgactgcttctaaatctacaagagtcacaggtgcacagcatcactcctcatgaatctcctggtttgaccatcagaacttcagaagtagagcaataaattaatggcattatcatacttttgcaagattttaaacttcaaatgaaaaaaaaaaaaaaaaaaaaacttctgttgtagtttaatatgatttcatttgtaaaatactgcttacagaatttcaggtttgatattgtatattctctattgttttttagtctctatgaaacagaaactggtgggtaatatattgtattgaactgctgattttgaaattcaagaaaacaaaagctgaattctttctgaacatattttgctattctcaatctgatgggtaagttttaaagtgagagtattcaacttgatttcagagctcccgctgtatctattgctgggtattttatgtggtctggtgtcattggccctatctagatgtacatcatatatgttgactattgttgacaatctgcacaaggccactggcattccacgatcttcattccctgtattgggaggcttatcagttgggttgatagcattgatatatcctgaaatcctctactggggttttgagaatattgacattttattagaatctcggccatttgttaaaggcctttccactgacctattgcttcagctaatagctgtcaagatagttgcaacttctctgtgcagggcttctggattagtgggagggtattatgccccgtctctctttattggtggtgcaactgggatggcttatggaaaattaattagtttggctgttgctgagtctaatcccacgattaacctctctgtgttggaagtggcatcaccacaagcttatggcctggtactattctttccattttggctattatatggtttttaccatttcgtattttatgattggcatcgtcagtttttcttctctttgacatgggggatcaattatatctttccaagatgactaccatgggtctacaaagagccatttccaagaggaactctctttcctgtgtgtacctaatatgagtttttaatatttcagaattttgattctagatagggaccataaggtttgctaactagtttgatgttaaagtcctgtctcttcagttcttgcttgttatcttaggagaatctcttggacatctgtcctgtaatctattctctgtaagtaaaattcttttgttaaatatctgattaaaagaaggatgccatgggtacaataaatgtcaaatgcataagttggcattttaggttatcaatgtattaagctgatggatgatgcccttttttcttgctggatatggctccttttcattcttgggctaggaatataagggtcgggttttgtattcagggggggattgctctataggttacttttgtgaaggggtatctagacaaatccagatctatggatgcctaattcttgcaatacagcttgtattagggctccataggtctacacatagtagggcaacagtgtaaatataatagtaccacttgtacttaccttattattataatacatattactttttgctgaaagtaaaatgaaagaaggaagagaaatgaaaggtatttctcttgcttgggagttttttcagtaaataaaagataagtagtctacctctaacaatttttcgattccttgagagtggaggataggtccattgcttgtgtttcaataatgttactttgtaaacatccaatcaagtgaaaggaaagtaatttttgaatctttttttttcttttgctaattttcgttgcttttttttttttttttttaatacatttcaagggtgtttggtttatgctctgttttattttcacttgatatgttttcactaacaatttcaaagacgctaccttcttttcatttggtttcctattttcaagattttgtgaggaaatggtgtaatagaaaacaaaccatacagcctctaaatttccaaacaaagcatttactctttggtgaaatcataaaacttattttgtgttcaagtagctggaatgaatttacataagcttcaattcatgcttacaaatagcattatccattgcatttccaactatcaatagtcatggtatataatgatatgttttcagtttgttggtttcagaactgtcacctattaacgttgttgagatctcacattgactagagatatgcccaatatattccttaaaagctttggacaatcctccatgtagaagctggttttgtggggttgattagaagtcttgagccaaaattcttaagataatatcagagtctatcctagatctgttactgggcttcttgtatctgtgtatgatctagatgtctattcctaggcatgaggaggtggtattattgggccacctgcattatctatgctccaaatgtctagtcctaggcttgacgaggtgtgatgagatcccacatcgactaaagatataatcaatgtagtccttataagtcttgggcagtcttctccttacaagttggttttgtggcgtttagttaggtcctattgtcctaagctcaaactctaaaacaaaatgaaagcaataactagcaatttgaaattctgaagcactgtatagtgtaagaaaatgattccttttatgagacaatgaagatatgcttttggataattgaagggatgagaactgctatagcccaaaaatgagcttgaccttgcaattacgctttgcttcttgcttctccatgtagccaagtttccacccaagaacatacaatatcttgaagtggaccttctatctataatggaccttgcattagtgtataactccatagtgagtctctctctcctttaacagaccagagcagccttcttgggattcctttcagatactgaagaatttattcactgcctacaaatgtctcatgttgataatgcataaatttgtgaactacgcttagtgcatagatgaccatattgaagttccttttgcaggttgggatggcagcgactcttgcaggagtttgtcaagtaccacttactgcagttttgcttctgttcgaattgacacaggactatcggattgttctaccacttcttggagctgtaggcttgtcgtcatggatttcatctgtacagacaaaaagaggagatgacagaggggcaaaaaaaatggagttagaaaactcaaattctgctttactttcagaaatatcttctcgtagttcaattgagtcatctgctggtaatacctttgctgaagatgtgtcatatttgagtaatttgtgtcaagtggaaagttcactttgtgtagaggatgataatgttgaaacaacatattttgtaaggagaacatttgtttcggaagccatgaagacaagatatgtgacggtttcaatgtgcacaccacttatagaagtaatagatctcatgcttgcagagaaacaatcttgtgccgtaattgttgataccgatgatactttaatcggttttttgacgcttagagacattcaagagtatggtaaatttgcaaaagcaagaagcacaaaacataaggtacaagaatccaagtttagtattaattggatgtgaatctataaatcctaagataataggtgatgggtatgctattgaaattgtatcttaattatgagcttgcaattttataccatgaattggagttggtagacacttatcataatacataatcggtgatacaacacatttaaccaatcattgtttgaaaaccagcagtcattacacaaatgtaggttctctatatttgtaatgtaacctgggatgcacaagtccgagtttaaaaagtgccttgtagatgaattggttgaagatattgtaagccccccctccccccttttctattaattgtgtttcatttgtagatatttggtatcaactgctgaactaaactactttgttgttgcttcacaaatctgattatttggttcttcttcttacaggagcttttagtttctgaattttgccttttaaatggagaaatatgcagcgtgccatggacagctacacctgatatggaacttcgttatgctcaaatgattatgaaggagcgcagattcaatcatgttcctgttgtgaggaatatctatgaaagaacatatccagttggcattatagacccagagagtatcagtctaacatgcaggttttattcctttttttccaatgacttatttgtatccctttttaataaattgttttgtcttccaggagcacaaatcttttttcaaatatacaatttgtattttaattcatatttatttcttattttgaaaggattgaattaaaacagtacaggaaagataatatgctaatacgcatggacatatacaccttgttatttatatcagggttttgtttaaacatgaagtgtcagtggaatatgtagaatagttagatgcttacaaagatgtcagttgccacaagacaggaagattcaactagattttttataggctcaaaagagctactactctactcctatcaatctaccattaaaactatagaaagttacagagctaataaaataaagactcaaatatttcttcattgatactcagccaaatgagggataaaatttataacctaaaatggttgtcaataacaaccgcacaagtatcctcatctaattttagagaatttaaaataaaactgaataatattaaaaagataatatttgaatcatttaatatttaagtcacctattttggactctctaggcctattctatcaattttcctcataggtttgatgattacgagtgcatttggaatttgtgatttgaattttgaatatcttgggaggttgaagggtaaatttcattgcatttgctgaactttgcttcatggcattgacattgaatgttaagcaaatgtacgacagacagaatagtcctaaaatgtggcatgcagactggaaaatcacgaattcagatgtggaatgcagagatgcaaattccttaataataaaaaatcagatatactaaaatgagtggatctaaaaggaaaatctaggatggccagggatgaaacttaaaggacggaataggaataggaatcattcttcatttcaatcattttggggttaaaaaggatattacttaattctcttccatgtttgtatgtatgttatgcctttacgtaattatttatttttgttaagtacagtgctttggccaccagacagtccctcagctaatattccacactgacttaatcaccgttaggaggctgaagactctttcttggcactataatatctgcctttaacacgccaagttaaatcctgtcacgtcgttggttccgtggttgtacgtaaaaaaaggttcggtggagttcatgtgtatagttatgttcgatgaaagtaaatgtagttcccccaagagagaacccttgtaatttgatatagccatatgtattgtccgatatttaatttgcagggatcaatttggtactgcaatattatagtaccaccactatgactttgcaattttcaatataaaaaaaaataaaattctgtgacttttcaaccgaaatctagtagcatttcattcaagtgtatcttttccgagtagtgtagtaatagaagaaaaaatagttggaattaggaagtgcaacaagttgtccaggcatacgaagttagaaatattaatttctcattgtttgacatatattacaaaaaacatttacaggaaatatcgtttgagtttgatgaatatacatggtcagtgtaagattttatatgatcaatcaattaaaaataaattttggtgtgatttttagggtgattattatcgaagtaaaaaaattattatatataataatttgtcatctgatgagagacaacttaaaaaagcgcatatccttttttatcattgtttcttaggaatatttttttattcatgtttatcataaaattgttctcataaggtatgtaggaatctaataaataattttttaaaatattttcttatgtgataaataattaaatttaagaataaaaatactaataaatgtacttagtatacgtattataatttttaaaatgtttttttattaatacattgtcttaattttttaatacattaaatattatacttttaaaaaacttttttatttttttaattatttaaaaatagttaggacattaattaacaaatcatttcagaatattattgttgcaacatttcaagaaatattttaatagaattgtaaaaaaaactatttttgaaatagataaaatatatttttatccctaggtcaaaatttgattttactccatataaaaatttaatgttttttgtacttatatttttaaaaaagcacgtgtgtctattcctgatgaggaaataaatgttagtatctgtataatttttttacacatgtaaatgatttagactgaacaagtaatactaaaattcaaaaaatttacataagaaataaaaataaaaattatgaaaactttatgacaacatttttttttcttttttttttttttttaaatagaatctcggtgcttcaggttttaaaaaaatcacattaatcctttaaagtttctctattatacaatataggttcatatgttagtttatcacacatgacaaaaataaaaaatatcacatcaatcaaatttaacatcattagtaccaaaaactatcacaaggatcaatttggtctaagaaagacattaaaaaagatcagagtaaaactttttaaatttaacaacctcatcaattgatctacattgggtaaaaaatttaaatcatataaaataattgaattattatcttaggattcttgattttaggaattatgattttgggtataaaaaaatatcctttaccaaataccctctcggttaaagttacacctcactagtattttatcatgtgtattacaaaaaataaatgctttttggatataattaaaatttataataaataaatacttttaattatataatttatattataattaaaatttataataaataaatattttgaaacatttaaaatatattttagatttatgattaataatttatattgtgatagtaattattgatagtttttttaacaaaaatatatatattgaaagaaaagcaggtaaacacatcctcattgaagaatgacaattaaaaatactctcaagatatgagtagagtttttataagaaattacaaccatgataccataccacaatagtataaaagaaaaggtacattgtagaatattgagcctacaatgttattgattttggtaaatgaatatttgaggcaatttctcaatttctcttaggacactcactaaacatggaaaacaccatctaattggctatgtgattataaatttgaatttaaacttgatttttgtaatttgaatatcagaaattcatcaaagtcaaaagcagactaaacctcaagattcagtcaacgttgatagagatacttacatattatttatcaacaaaattcttacatggacaaaaaaattgaatctatgtctttatgagttataaattcattctataccaactagatcaatttttattgactaaatacacccaatctatgatgattaatggaaaagaatattctaaattctcttgcaaaatctttctattaatcttcttactaggtaaaaaaaagtattaaatgcattttaatttctaaaacattaaatatgtttatttttcatttaatattttcttcatatggtattaaaaaattgtaaatagttgttgaaacacttggactttatgcaaatcaaatagttcattttctgcgggttaaaaattatgtaagcaattccttaaaaaagaaaaaactatgtaagcaattattaaactcagaaaaatattaatacgatgacgtataagtgctacattattattttcttaaagcaaacttggactataaaagttgacatcaatataataaatacagtactgaacaaaaaaataatacactgcaaaccaactttatacataataagaggtctacaagacaattgtggggcggcgggttgtcatgggatcattattgatgcgcgactggattgccaaaatagaatttgttttcctatctgtttcaattttaattctccatagtctttagatgccatctttcatgcttatcttgatgttttccaccttaactgacaactctaacttgtgatcctcaacagctttcaaaactgaaagcaggttggagcgataaatttcacacttccgatttgcacactcaagctcattcataagttttctaatattcttatccaaatcatcctgcaggacataaagcaatgaaactaaaataaacaaaagcatacttaagcatgaatgattatatatttaaaaccaatgatataaaatctgttacacaataaatgttttctttcttcagaaagaatataatatttgaaagaaataagagaaagtacatctaggggaagaataataaatccccctaaatttaagaaaatgaaacagtaacgaagtttctatatatctttcaacatcattaatatttgtatataaaatccctcctgattctaatctgttcagattatttcattgttaggtttagctgtttccaatttagactcctaaattagtgtacagtcttcattattactttgacctgtaattcatatttgaatcaaggaatggaaacagagctttatttaaaataccacaaatgattatatatatatatatatatatatatatatatatatgtatctggacttaaatacagtaaatctacaaaagcactcataataactaaaggttattgaaggattaagagtaaaaagtaactagccttaccttgagagctaaaaagggtgtgccaacaatcaactttctcaaaatcttatgcggttagatgaaggttcaagactagttatatatctctaaccccctcacaccaattccttagggcttgagacaaggccattgcacaggttttctctatcttgtgacagaattaaactttatttataagaatgaaagtggcagggatcaaactcctaactacttggtcatagcagctctggtacgatttcaagattggttttaggtgaagccgtcaaggtttatatcataatgccttaagctattaggtgaaggttcgggattggtttcatataacggtggatgaaagagtaaatgcactcaaacagatatcataaaagagattaaaaacatttttcaaatggaaatcagaccttagacatatgctggctcaagctttcttcctggcacccacttgtgtaattagcatgaatttcctcgttcagcacatgactccttacctttccattactgataggaatttttccctcattttgcattccctgagaaactctttttgcagcttcttgtaaagcatccattgcaacatcataagtttcaacagaccgcgcgccttcatcaacaaatttaaaagcctcatgccggagggtgttatatctaactgtatgagattccaaatagtaagtatatatatcacaagcatgttcttctaatattacattgcttttggcatttcttgtccaacgtttcagtatataatgagatgggagagtaagcacattggtaactctaaagactgccaaaacgtgcctacaaagaaggcctgaaaactcaaacatttggcaactgcaagtcgctttcatctccagaacattgaatttaacacaataccctttatggtcctctccaaatttagctacatgatatgtaatgacctccccatcatcatcagctttggatgccattaatgtaagtgtcccaactaactcctcctggaacctcatgaaaatttttctcgtgtaaagttcagatgcttgcttctccattggagatggggttctcaataccggcaaagtattcattgtgtcataatccgctctcacttctttctcattgcgactttcaagtgctttctcatagagcttaaagaactgacttaaattggttgaagcatttatatacccatcaaagtaagagttcatgctatcacttcgctgagtgatggacatttctgcaaagaatgtgtctcgcaaatatacaggtacccactgcctacaagaagaatatattgcttgaagccattcatggtccctgagatcatatttatctacaagtgttgaccagcaagactcaaattcctcagtcgactcagtcaagttaacacatttgtgaaattctgcttcaaaatttggatattggaggaaaatatgagataacttctcctggcattttttaaagatgtgccacttgcagaaacggtggcgggtctcggggaagacttgtattatggctgaccgaattacagaatcatgatcagttgttattgacactggcggatgtccagacatggccataagccatgtcttgaaaagccacacaaatgatgcttcagattcgttaattaggaaagcacaaccaaagagaacaggttgcccatgatggtttacaccagtaaagggagcaaatggtaaccgatacctattagatcggtatgtggtgtcaaaggttacagtatcaccaaaaaatgtataattcatcctagccttgggatcagcccagaaaacattggttatggactgatcctcatctccttgcacagcatagaagaaattagggttttcggcatgcatctgtctcaaataatcaagaacaagttgaatgtcaccttctaaacttctcagcctattattcctcatgtaattcctacagtccacctctgtgaagccgactttgctaatcccaccatactctttaataagtgcagacataattctacgagggcccatcccagcagcctgtaaagtatcgataagcgtcttggcagatcctgaaatttgcctgtgagagcgaaggcaatgcacctggtctggtggaacgagttcgtgattatgttctctaacaaagccagagacgatccacttgccagagtcttgcattttgacagaaagagaggctttacaaccgactcgggtaattgtacgtgggcgcttgatctctctatcctttgtgcgtttctcattcaagttgcggaaaccctcctttgcgcaaacaaattgcctctgtataatagctccatcgcgcctggaacgacgggatgagctgacgcgagtactaaacccaacacgacgggcataggaattgtagaaggccttggcagcctcttcagactcgaattccatgccctcgcaaggttcaagatctaagaggtccccctcaggaagatatatttccccacctccagtggctacagccaattcctcctcatcaattcctcctccgtcgtcatcgtcatattctccctcgcctcctcccagcccaatatcaaattctagcacctccacctcgttatccatcactaattaatttatttatatcccaattactaatactatttctgcgatcaggattcaggatatacactactacgaaacgaaagcaaagccacgagatatggaaaagaaaacaactgaccgtcgtcgaggtcgaggtcgaggtcgaggtcgagtgacagtaagaagtccgcgccggacaacaaagagattatacaactccaaccaaactgcagaatgaggaaatgccgatatttttctctctcaccataaacttattgctctcctctcaaaacaaaacataaagatatttaaccaattttatttttttatataaaaaaccatatcattcaaatattgataagtgataatggaatttaaatgctagattccctcctctttaaaattgtatcaacggagtcaaaatatttttaaaaatgggaaacacaattgtatttaaagttttttatttatacttacggttgcttgatagttatgtattttactattttttattctttattcacataattttaaatatttgatattacttattattataataattgattttttttaatactttgaaatcgaaaaaagaatttaatacctgtgactataaaaaaattacacaaattataattgtaaaatgaaatcagggccggtcctgaaaattctttggtccagggcgaactgaaaaaaatgggtccctaacacacaatttttttgaaatacaaataatactaaaattaagggatgaaaaaaatgggcccttaacacacaaattttttgaaatacaaataatattaaaactaagggatagaaaaaataggtctctaacacacaaaatggacccctaataaagattttatttttattttttttttaatttttttttttttttacttaagctatccatgcaaaaatatgtgggccctgggcgggcgccctgctggccctgccccagggctagccctgaatgaaataagaatgtgactagttaaatgaagaattttgatcgatcacgctttcctcctttatgtttatgaatgaatccattttgatcattaagatactaacatgggtaggattttaaattttaaaataactaatttaaaaatgatattcactaaaattgccacaattttttattaaaattttaaaagttataaactcaatcactcgcgattagtataagagtcatcaaagtattaacgcaaataaaattcattatgtaagaatttttagtgatttttacccctaaaacattttaaatcaccaacgtaaaaaaaaaaaaaaacattttaaatcaccataatgcacataaatacaacagtcattaccaacaatatattagttcaggaatttttaaatcattaaaacgaccaaatatacatgtttatactcaaaaccattcggccaatacacaagaaaaagaaaggtaagtttccttaggataacaaacttggaagccttttggtaccaagagatacacttctaaataaaaatatatatatatatatatataaaaaaattgattttttaatcattgcctgaaggtaacagttaagcaaataacaataataacaataatatattcgaatagactctatttaatttaaaagaattttaaattacttaaatattatcctttttgacaaatactaccctttttcaagtgtcaattttattaagaatttttttttgttcatttttatctcattttaaaagttcaaaactttccttactcttttattaattatatccttatatttatctatattttaaaattatcttacccatttatcatggaattaaacagatcaataaaaaataaattgtagaaaattaatcaataagataaataaataatataataagaaatcatgtaacaatcttaaaaaaagaatattaattatatatcttaattcttatgtcacaaccttaaacaacatctgaaaaggaacaagactacttttttggttccttaagagaaactatctccttccactatgactcaatctccattgttgaaaaggaacaagtcaggttaagttgtagactgccagcggctgcctaagtctcttcgctatctatctgtggtacttccatattctgcttgaaataaatttatcatttacattaatggcacatacaatcacaaaaaaccaagagtaacactacacaacaatggtgagtaaatcaagatatgaccatgtaatggctcgttctttagcttataaggaaaatgctgattgatattcagcaacgtccaaaaacaaagtatgccaaaactaaaactcagtccattataatttggccaacagatgaacggaacatattactcagggcatgttgaacttctccagaggtgtgttcactcctcacgagatctaccagtaagtgaaagaaccgtggaatatacctcctgaatgaatcctttttcagaccagccaatccttgcaatgctgagatgactaaagatgtcctagcagctatctcttccttctttgctgagctcagagggagttttccatgaggcgctggcatggtatcagacttgtgaaaagtggaaatggaaccagcacaatttaggtatatgtccaatacggtttcacacacagcaactaactcttgttctagctctatctcatcatgcacaaaattatcatgaagatgtatattttgtagaaagttgaggtgattctggaaggactcattttcaaaatgaaccatgggagggccagatatttccaggacagagcaagctttctgcaacttcctcagtagaattgactctctgttcatctcacgagcatgtaaagcaatagatgaatataattcaataaggactttgatgctggctgcagataaggattgctggtgctttttgtacagatcagttgtaacctgccaatagaacacagaaagatatcatcaagatgaactcattcagaggtgaaatttatatcaagctgcactacacgtctttaaatctgttttcatgaaaaaactaataaaacaaaatcagtggattacgatttaaattcagtggatgcatataaattgaatactaggaaatttagtgcttatgttttaattgttaacttatgcacatacaaaacgagcaagaaataaacctgtacaataagtagctgcatagcaatatggttcttcgttcttgacacaacatatgtggccgtttgcagattgtcatcatcaaattcatcattgttcaagtcatgatcagaagaactttctaagtcagcagaagaatgtgaaatgtgaggcacctcaatattattcatggttctcaagaccttcatgaatcctggcactgttgacatagctgcatctttcaaacatagaaaaatctctttccattcttctgctgaaagcctgttaccaaggtcacctgtgagacgcactaatccagcaactccagtactagctggaccctgaacaggacttctaatgaaccctgtcagtactgacaccaagccaggtagctgagacctcaccacatcaaagaaggtgacaaataaatctattaaacattctgctgctactgaataagtctcagaatcccatgtgcttccttcagtatacacagatactgaagaaggggaacaatgggcctcttgtagattcatctctctatttccagataccgagttatatacagggaaaataacagaacagaaaatgctattccaaaatgtgtgggagaatagatgaccatgatccttcaaaatgttaaaaagcacctccaaagaactctttctgatagctgatcttggatcagaagttagttttgataaccctgcaatgaaaatataaaaatattaacttaaagcagaaagaacagacaagagttatggaatttatgttatctcactgctgcacaaaatgtggttaaatcactattacgtttgcttttttgacactaactaggagctaaaggtaccacttatttgctacatctaacaagagaagtgcaagcaaatctgttgacaaaatgcaacaatcattgctcaagattttaacgcaaaaacttaatacaaagcttaacatactgtatataaaaggcagcttcaacaggaatgtgagcaatagacatttgagatttatgcaatcaatcaattaaacagaatacatacatttattggagaagattcacaagaataagttttttggtccaccgttatggtacgttggccactgtaccaaatatcttagggcatatcatctaaatgcatattacctgatagcaaaggattccaaaaggagacatgatcaccgttatcagtatgagattgtaaatctgaaataccatttgctacaacaattgatgggccatcaacactgctcttcttattgcaaacaagtcctccatcagcaagtctgaatgcacagaaacgaagaaacgcaattgcattgaggctaacgtcactgttgaatcggctatttgtaaatgtcaaaaggcatcggacacaatcggtgaaggtcattgtctctgtctcagtaatataaggaaaaaattcacgcactattttctccatggtctcaaatgctagtaatacaatattcttccgctcatcagctgcagcagctgtaaaaacctgagtcaaaaacactgcattataagtcaagattgttccattgtctcaattcacaaatgctaacaaatgagatgtgcattttcttcttgcttaggaaggaagcggggacattaatgaagcccatagctgaacatggtggtaaatgtcattatattaacaatttgctggtacactaaacttgtgtattgcatttagattgttgaaaaccatcaatagtttgactagatatgtatccttgatgtcccttttcttttctttttatttgtatttatttcctttttaacaagccgttttagaggtattaaaatttgaccatgaatattcattcctgaaagattgtttagactatctaaattgccaacaaatgtgtgtatgcaagtaataaaatgtaattttttcttgaaaagaatagtaaacaatcacaaatgtgccttctcaatttgttttgctttcttcaataaaaacaattgggcaacatttgacagtttcaatttttgttgtttatcaaatggtctcaaggagggagggagggagggaggaggggggggggggggatcaagccaacttcaacattaccataaaaacacttttccagccagatttcacattactgacacggctaaggaccatctgtgaaatacaacgaactattaattctctaatttctgtggtgttgcttttctgcataacaatcacaaatggtctcagaaattcattctggaagttataattagccagctcctcacgctccaaaaatttcattgcaagttgtcgcagcgagtccattgcaaagattgcaactgacaagttttctgacaatccaaccgacacaaagaaatctgagagaacattccatatgcgagaccatactaatctgatgcggttcatattataatgcctgcaaatgcaaccatgttctagtcttaagtagattgaatgatcattagaattttaatcataaatgtgcatgagaagagaataacttggaatcaccaattactagctacaaagaacatgaccaagagaaaatcacaatccctttcttaaggtctaataaaatcaacaaaggatcccctttcaggcaagtaacatttccctcattctaaaagatataacaattaacataaatatgttagagttagagacataaaaccattcttgatccaccatgtaacattttaagctttttggacagttgttccttgacatgatattagagcttccaggaccaatcagttaggagttcaatccttgtaagctcccatttataaataaagttgaatttcagcaaaaggaaaaattggcttgtgcattttttgtgctttaacctcaaatgattcttgggaaatgttggatgtataaaaccattctcaagatgtagtatatgtttttcaaaattaaaagatgattttatctaaattgattccttaccagttctataatagatacattcttagaaagtggattatgggcctaactcaaccctacaaaaccggcttgtaaggtgaggattgctccctacttatatactatatctcaacactatctctagccagtatggaacttcaacacacccctctttgcccatggctaccaaccaccacaactaaggtgggctaggggtgaccccaactaaggtggctttccaacatacatgatatcttaacatatctcataaatatccaagatattctaacactcccctccagccggtgtctatatatcatatgtgccaagcttgttccatatgtatctgccaaagtcctaaaacaccctaccttgctagtccttaagagctttgcctgccaagtagctcatagtcacaagaaattcctttcttttgaatgaccattttgtgatttaaaatataacagcataagaagatcacaacactcaaacacgggaccgaggagattgaacataccaaaaacctaaaccttcaatctgccaggttacttggcatccaagttacatccatataattccttatgagttatgataatagttgagcttatcaatagttgaacttatcttaaaattcttactttttccatctataacagccactttcttaagataaatatcaaaagcaataggttttatgtagcagggcaaggcattactttatttcgtgcttggccacaacattgggctaaatgcctaaaacatatgacaatgtcaacaccatattcaatatgaggaagagaaaaaattgctggggtcatgtattcataatttcatatactaggatatttcatattcataccaaaacacactaggaaaagtacaaataaggaatataaaacaaaatgggcaatgtctgagtgtaaattgcatggtttatattcattgtgcaagctccatatgtcaagaaaattattatttaagaaatctgaatgaattgcacaaagagaacatctatcataaaaaggacaaagaaacttacgcaatttctactattttagtgaggccaaatacacgggggtctgttggagactgtaactctgaaatggaaactttacaaagtgctttaacaaatgctactattgcttctccattcaaccgttgactatgagcaaacacatggttcagttcaaagtttccaatctggtccagtagattcaagtttgaaatgaaattatttatctgttctgttgttaatattgcagaagcattgaccccaatacttgtactgtcatatgaactaccacggacaacagccaccatggctggattctggagtgttcctttcttaaaagaagagaaacttaatgttttcagtgctttctcctccatttcaaaattagctgaagtgaagaaggttgcatcacttggggcaccctcacctaacagttgcaaatgctcaattcgggagaggcaagttaatatgtgttcccatgcttcatacagatgatctccatcttcaatcgcaattgatattattgcctgcacaaaaataagatttaaaagatactaaaatgacatatacatgaaatcaagtggttcattcacatgataaacacaaaaaaatgtaccaatcacattctattttcatgcgaaggattaagcaaataaaatcaaagtgaacccattcatcactgctttcttgatataagtacaatatggctaaaatgacattaatatatggtgtgcaataagcagttatcattataaatgcaaaaggagaataaaggtgtgagtgatttgatttgagtaatgtcaatggcatccaaattaagattcacttaccttgacagcatcaacatttttctgtttcatatctccagcacagtgcagataagtaaatttggcaacagatgtaacaaaagcatccctttgagtctgcagacccatcactgcagtaacatgcacagcatgtcgaaatccttgtaagcattgagaagtagctaccctgtcatcactctgatcaagtgttacactgaatgcagccagcataggcccccaacaaacttccaccataaacctcagtatagccacatctgtgacaacatgatacgcagatctgcaataaccggtaaataaaatgtctaaactctaaactatgaaacgcattgaaagattaacatcccttatgtaatctataatccagcagatagctaagccttaaaggaaaagaaaaatgcacatatggaaaggatgtaagatgcagagccagtacacaatcataaatatataaacaataaacaacaatagttgtagccttttcccaccgggtggggccagctctcatgaatcaaaaggtaaaatcctctcatatatcatatcaatatacaaactatttaaatctaaatctttcttaacggttttccctaagacttttcttagtttttctctacctctaactattgggacttatataggtcttctctacaaatgctcaaaccacctaaagcaagaatctaccatattttattttcaacaataggtgctaccccaatgttctctagaatgcattcattcacaaacttgtctgtatgtcatcgtaacattctcatctctacaatattgagcttttctccttgttggatttcattgcccaacatcacaagtcttatagttatgtagtaagattttcccttaagcttgagtggtactttcctatcacaaataacacctaaagcactccttgatttcatccatcccacttgaattctatggtttacatttccccatcatttgtatgatgaccaagaaacttgaactatagaacctatgacttgtggtatgttatagtctccaaatttcatgtccatactagaattagtgcgcctctagctaaactaacattttatatacttcatttcccttctacttaaacaaaagtcaagcttccaaagtttgtctcctcctctattgcttctcatttatttcttctctcaactatccaaccagggcatatcatctgcaaaatgcatgcattatgccatctgcctcatggatatgttcagtaagaaataagaacatccaagaccaagttaaaaagatagaggtttgaagctcactcttggtgcagtccaatagttataagaaagtcctttgtgcgcctcaccttatgttcacactctaatttgaaaccatcttacatatctttggttgcccgactacaagcaggacaaactcctttcatttcctaagcgaaggacaatacctctcttcgtaccccaccatatggtttttccaaattgatgaattgtccttttaattcctctaatgtctctccattaattcctccaatgtttttccattaatctttgaaggaagtatatttgctttcgtgggtaacctccccgacataaaacaaaattcattttctataatgactgcttaattaccctatcttgtagtttcataatatggctcatgagcttaatatttctataactagaccagttttagaagtcactcttgttctcatactcatatataggggctatttggggtcacagaaatagtattattttccaaagcggggggtttgatagccataggctgtttgatgatgccctcttcttttgctggtggtggtgtaaaaatttggataaaggcttttacttgccgtttcatgtatggtcatctaatactagggatatgtttcgtgtatagggaaggttattatcatacttgtatggggggctttgtccatcctcgctatgatattctaattcaggccttctatgtattaggctaccatagctatggtttttgctagcatggacttgtttttgtttttatacttgtatcttttgccctaatattaatattatactttatctttgccgatcaaaaaaaaaaaaaaaaaaaatatagagaataaggcacttctctactcatttagtattatctccaatctcataatcttgttaaacaactcaatgagccattttatgctcctacacccttttcatacctcatggtatataatttgaccgatgtcctccaaaaaccctccctcacttctttcaaaactccttttttcccttcaattgctaccattttatccttgaaatcctatcttaaccatttctatttactctcctcttgagttatatatccataaccaagatcctatgctggataaacaagtattctccaagtatgactttgcaatccatgcaaaagtttctatctgatttcctaattagagggaaaaaaaaacaattttggaagcatgtcaccttactttagtatgtgatatgatgttcttcccattacctaaaacaagtgttagctaaagcaaaatctagaaatgttttaccctctactatactctagacaatcattcatgtgaccaatcattcatgtgaccaactagatcatctcctaggaaaatcttaaaaaaaaaaaacaaaaaactacgtaccccattgcccagagctcctcgctatgcgaaggtaagggggagggatattgtacgcagccttacccttgcatctgcaaagaggctatttccggattcgaatccatgaccaacaagtcactaaggtacaactttactgttgtgttagggctcaccctcctaggaaaatctttactcatttcaaaattcctttaactaaaccttctgaatcctctcaaaaatgttagataaaaaaaatccattgaaagatatcaagtagcagagccagccaaatcaaagcctatatacaaaaaattgtggaaaagacagagcttagcaggtctagttttgcaaccaaatacatttccaaaaaaaattaatgataaaaaaataatgcttaaatatttttttggttcctcaaatttgagccaaatttcttgtccttttggtttcccaaattaaaaatgattatttttgttccctactttgaaaatagccctcttttggcccttaaggttattttttgcaatcattttagtctccgtgataaggaccaaaagtgggctatttccaaattaggggaatgaaaaaaacacttttaaatttgggtaaccaaaaggaaattaggcctaaatttaagatacccaaattatatttaagcctaaaataaaaatccaaacattgagaaatgtcttggcttactctgattttcgcgaattagttttaaattgctcctgaatgtgctgaatgagaagcccatttgcacccactgctttttcctcattctgcttccagttcacaagattgagtataccttctaatctcagcaatctattgaagctattagcttgtttattctgaggtgcagaagaatcagcgttcattttaatttcatttttaacaatttggtcataaagtgccccgagatattcctctggtaaatcctttccatcatctattccacggttgtttcgaacaaaatcagcctttgtcatctggaaatccattaacatagaatatacaccacaagttcaggtcaaacctatattcagcattgtaagatattctgaacttacaatctcaattttgtaaaacaatagaacaaatataagcaatcaaatgatatccaagtcatttacaaaatgatattacatgttgatgttatagctcatggtgttcactgtgtttccctgacacaaagctatgatttaccataactaccaccacctacataagaagataaaagaaatggaaagagaaaataattgatattttcaaagctgtattcagaataaatacgcataaatcaaattgcctttataggataattttctatgattaaaattatcatattcaaatttcatcagtaaaatatgatgtaccaactattaaaaaaatcaattaagcctaatagaaacgaaaccacacctagattggacatcaagtaatgtcacaaagctggtactctaactgttgagcctaagacataatataaaagattcagcaaggtcaaaccttatctttcaccatattattatgagcatctgtattaagcattatcacagagtaagcaagaacgtaggcagtatctgcactgctaaaagaactagggttgcatttacagtagcgctcagcaaacttctccatgatgcgatcaattttttgtgcctcaccaggcaacctgaagccctgaagaaaaaatcgaatagcttcaccaaaatccatccctttgaagttaaaggaatctacataagcatgcataacttttagagaaaactcctccctttctcccaaatagtcaccaatcttggtttcatcaaggccagcagtgttcttcaggaacagtgccacttgttctggagaacaaccaatttttttgttgcttatcaaaaattcaataccttttggaggttttcgattaaaaagtgatatgcctttctgcatttaacccagaaaaaaaaaaaaaaaaaaaaaaaaaaagcatcagcatagaatatgaaaatttgcagctcaggaagacaaaattatgtataaatgcaattcatgggagcagaaggagagatacagaagagaattgtacaaacacaatataggtttttgggtaggtaaaatcaaacaattagaactcaatgttatgctagtataagaggatagtttaacattagggtaaattatgattttggttcctctaaaattttaagagtttggttttagtccctctaaatttttttgtctgtttttggtccttctaattttgaaatgcaccacttttggtcctccaagtggtttagatgacactttacagagagatgaaaagtgatgtagatagcacttggaggaccaaaagtggtgcatttcaaaattagaggcaccaaatacggacaaaaaaaatttagagggacttaaaccgaactttcaaaaatttagagggaccaaaaacatattttaccgttaacattgtgacaatataacaatttgtcgtcctcggagccaagtaatacatacctgaagttcgattttatatgcccgacgttgctcaaacgtggcagcatccgaaaattcagaatttacatcagaatgtagctcgtgatcagaagcatttccttcttctacatttagtattagatgattctctgctgcattactgctttcagggctctttgctgggcctaaatctcctaaccttatctgctggtccatccatgctcccattgacttaataatgctgaccaagcatttcacagattcatgtcggaaagtaatatcctgtgctggagacaaagcagtggtcgaccctgtaggtggtcccaaagcggttttcagaagaccattgacaatcctgcaaatatctgatagaattataagtgtttaaatactaaaacaagatgcaaaatcaaacaaacataagtaaataaaaaatctgtcactagatttgtactgcagaccttgaataagctttaacttttggaagcagacagtgctccaagtacaccatataagaaaacgaatcaataaagaagcaaggaaacaattatgatcctaaaacccaaggtatggcctccaacatgacgatctactccaaataactaaattttttatcagaacttgttacaaactaacaattccaaaatcttaagctgttaaggtttagacaaatgaatagttttatattactcctctaagacaccaccttgcacaaaagccttttaaagctttagatcatgttttactcacagtttttcttatctcatttctagtattttgataccttgcccaattttctgcattattgcactcatgtaaggtttttaaagcaaactcttttgtttcttacctagtcttgaaaactttcattccaccaccaacattctttatcttggtccaaaaccttttaattcactcaggactcctcaggcaagcttccaaatcttcttagacgtctcattccaaattaatagagttgagtgaatatgagagaagagaagagaatgagattgagattgagaaatctaatgttattcaacccaagtcataactgattacagttacagattatatagatgatctaacaactaacaacctaacagtcaactaacctaagttagttgatacagctgtcactagcggttacacactaatgacctctaatcacaaactaactactaacaatggtagttagactaacagcttactgaaataaagaaaaaaatacatttgagtaaatgtaatactcttatacccccctgcaagctcacgagggattggaagaaattctttcaactactatgagcttggatctgaatggaacaaatgaagcaggagagagggccttggtcagaatatcagcaagttgatctgctgcaggcacatgaataacatcaatctgtttggtgatgaccttcttcccaacaaagaacagatcaagctccaaatgtttagttcgagaatgaagaacagggttgtgagcaagagagacagtgctggtattatcacagagaatgagaggagcggtatgagcaacttggagttcagaagcagagactgaatccaagttacctctgctgtaataagagccatgctcctgtattctgcctcagtgctcgatctagctacaactgattgcttcttagaccaccaggaaatgagattaggttcaagtaaaaatagctgctccaagttgaccttctgtcatcaggatcagatgcccaatctgcagcacaataggcatgaagagagaaaggaagcctaggagaaccagcttgaaattttaatccccaagacatagtcccttttagatacctcagaattcttttcacagccatccagtgctgctcagaaggcttggacatgaacgggcaaaccttgttaacagaaaatccaatctaatttctggtctggtaatagtggcatactgcaaagccccatcaatagatctatacaaagttcagaaccaaacttggttaacctctgtttatgtataatcaaacctacataaacattcaaacacacgattttcactcaactgtccctttgttttctcctatttcaaaatggtatccagagcctaacaggggtatcacgaaaacaatgcctcaccggggacaatgggtccctggtggacccttctacttgccgcacctttttcgagcgatctttctaacctccggttgccgtcactttttcgacagccactgttcattgaccattttttcgacaagttttttgtcggccagtacatcctcggggtgcactttccccagatctgtttgcctgcaccaaacacatccccaaagatgcacagacgcgtacgttctttgcgcacctaacagcaactaaggtcagcgcatctggccaccttccggacgtcgtttgcaacactaggctctctaaaataaggcgcacaagacccaatccttttcggtttgttccatgagtgtttcctcgacattcctttttttcctatattcaaatgcactggccttgtctttatcctagatgtattggcccttgtctttgtcccagatacaccgatcctgcctatgtcccagatgcactgatcccgcctatgtcccaaatgcacttgtcccaacgactttgccccagatgcatctatctcgccttcagtttaaataattagggtctccaacctttttggtttgaagcttttaaatgtggtttcaagaagaaggaaccttgctttgcttgccacgaattttctcactgatggtcattccttccagcttatctagcaaagatttttttttctagcaattatctcgatcttctcaacatccctgagttgcttttcaaactattgttcttaggtggagcttaattttgtgtattttattgatttattgggaataatttattttcttgtaacatgatgagagcttagtaagcttcagcttgagggcgagtgttgaaaatcagaatataatatacatttattattagtaggaaagtaggatttgtaggaaactagaatttggttttgaggaaacaaaatatcctcacattgttagtatttattgtaatgaccactatagaatagagcattggttgtgtactctaacacatggttttcaatcaattttcctttgtttctcctattttaacatgagtgttgaaaatcagaatataatattgtgactctataaataatactgatttataggcacataatctttgatttagaggaaacaacatgtcctctatttatgtaaaatcaatgtattaaacctaaataaacaagcctccgctatgtattcaaacacacagttttcactcaactatccctttgttttctcttatttcaacagtgacattgaacctccactcttataagtgattagatgttcctctagcttcttgaaacaagttttcataatctaaaatcataagtcgtaaagaaatcaaaaatagtttgtccttcctcatttagtcctccaaaacccaaaccaatatgagctcctgaaaattgacttgcctcacgaccacacatatccacttagatccttgcctaagaaaatcttttcctcatatccacttagatccttgcctaagaaaatattttcctcttatggaacgccttgtaccaacccctccatatcttcccaagacttttcttccataagtgcctccaatcctacttgtggtgtataagcactaatgatattgatgatctcctatgccacaactaattttaaggataagattttgtccccaattctttttaaatccaccacgctatctttcaaatccttgcctacaataatagcctaccatttattcctctaacttttcccatgtattagtttaaatcctgtggtatctagctccttagcttttttctctaacccacttgatctcttgtaggtacataatgttaatcctcctccaaatcatggtatccaatatccacctccatagacttacaatttccaagtagcaaacctaatcaagcacctctaaactagcttcttcacacacatccatccaggaaaatgtgaggactcttactcatttaacactacattcagacatcaatgcaacgactatagctcatttgacactgtactcgagtcatacagtgcgatatttccaactaacgacttagcattagctaaaatcttatgtgagtgatccatgttttatgttagttgtcgagggcctagcacaagtgcacaaccctcctcctttatactttattactaacagaactaattttaatcttccaaatccttaataaagtatttcaacaatcctaatttgacaccaaccacacccacccaaaacctccgccacaaaagccaaatctaaatctacatttcatacaattccaggacactccctaggcttaaagttagtcaaccactatccaccaccctagaaggcatcctttttttctatcaataaatgaaaaaaaaagaatccaatgattttgcattaacaaggttattcatcatttttttttggcaaacaaaattatttatcacctttgctttttaaaatattagcccatgtttgttcttgaaaactgaccactaccaaggtataagagcaacaaaatattacaaaagcaagatacctttcaaatatgtttgaagcatccacatcacaatcatagttgacaaaaatgtcaataataatctgaggatcttgagatattttgtccaataaattaaggatggtcattttttgcagaaaactaggctgaagaacattctcgagaactcgaaggataagcatgggaaagaacatgccaatttcttttttcaagcctgatctgaattttgataacaagttcatgaaaatggaacactgaagttgaaaaatggccatcactgacagggcactgttcttcaataatgacaagcaaagatattgcttgatggcattgagaaacctgcaccgtgtaaaagcaatataggtgtcatgataaattattaacaataaaatggaaaataaagatcttagggaaagaacctttatacatatgtgtaagtcaatgtcattgaacgcaaagagagaagtatattctataacctactatttttacactccacctcaagttagatcatataaaccatatgaaccaagctattacaaaatgtagcaaatccaaagaccctcaagagaattaacaaacacatctattacttattttgtgagaaaatgagaaaggaaaattttctgaatgtgcttgaggttgagtcttttctccggccaacagaatggacttatttatattcaagaaaagttaattaatgccaaaacaatttacaagagaatattaaagtaccactacagcacgactttctaagatgcaatgaacctagctataccaagtatctaggctacttggaaaaataaacaataaagaagctcttatctcctaatatactcctatttccaacatgtttattcaaatttccaaggctagtagtgccataaaactagacaaaatcttgcatgaagtggaagcccatctttatgtgctttgttgcttcatgtaaaactgtattcgaggaaatttaaaggttgtttgacttcacatattagtcacattgcatatgctttatttctccaaaacttaattcttgaaacaattatttcaaccatatgagtgcaaagctaaccaatgtcatggctcaatattatgcttctggacttaaccaggggaaacatcctgcttgtcacagtattacatcaggaaaatgaagaaagagggtcggcaaaatgggattttagcccatcgttagtgtgatggactaatggttgatacgacaacaaagcatgcttgatcttatctggaattgtcactccatgaaaacactgacaggctagccataattatcagctcccatgatgctatgcatcaacatgatagcatgattatatcacactatcaacaactatatgtagagaaaaaagatggtttgacaattgtccatgagcgaagaaaaccaataaaaggcctactaagaagagttgatcagatggaggatagcaagtagaggaaggcaaagtaaaaaaagcaaaacaactagaaagaacttggatctaaatgacctctctaaaggctaggattttgagaaaatacaatggtgttgtttggtccatgtagcagaacctagtggttaaagcctttttatagttgtttattctgatgtattgtgtggttaatgaaatgcctttgttttaagaccatatacaatcatccatcttatgtttatacattttttttttggccagcaaaaattatatatatatatagataagaaaagtctgcattacaaggagtattgcaaaacgaaacctagaaaaacaaaccagaacgaaggaagcttaaaacatggaaacatgatgaaagccacctgagttctgacttagactaggtcatcatacaaaaattcaaatttctaccctcccctgattacaaaagccaaccccatattagtagaccaaaagtggaaagggaaagtaaagccctcctctaaatttctaagccacaaccagcataggaataatgcatcctccatcaaattgtgtctattaaagctgattccttgaaaaatgattttgttcctgtggtgccaaatagtccatgtcagatcttttttatgtataaaaagggatatcaattgaaaacattgatgggtcataaatttgagaattctctaactccgataactagtatacaaccccaccaaaaaatcaaaggatcgtctatttatttcttgaaataaaaagagcagataaacaaagaagcaatatgaagaacatgatatacaagaaatattctttaaaacaccacacgtagcaaagaggccatcatatagagatttaaaaaagaagtagctgaaacaagttacatccaaaacttcttcaacttaaattgaaccaacaaataataaaaaaaagttatgggcaggctagtaggtagatttatgtgtattatcacattatatgtttaataaacttgtcacctccttataataaaaaaatgttgcatattagctacttaactcctaaaaacagtacataattatttttttattgaaaaagcaattttatttgagagaaaaaagagaatataactagggtaggataagataccccctgaaaagaaagttcttgatacaaaaaaaaataatttacataccccattgctgagagactcctcgatatgcaaaaataagagggagggatatagtacacagtcttacccttgcatatgcaaaaaagctgtttcctgatttgatctcatgaccaacaagtcaccaaggcacaactttaccgttgtgtcagggctcgcactcaaaaccacgtacctcattgcccaaaggctcctcgctatgtgaaggtaagggggagggatattgtacacagccttacccttacatatgcaaagaggctgtttccggattcgaacccatgaccaataagtcaccaaggctcaactttaccgttgtatcagggctcgccttctaaactgcgtaccccattgcgcaagggctcctcgctatgcgcaggtaagggggagcgatattgtacgcagccttacccttgcatatgcaaagaggttgtttccagattcgaacccatgaccaacaagttatcaaggcacaactttaccattgtgtcagggctcgccctcaaaaccacgtacaccattacctagaggctcctcgctatgtgaaggtaagggggaggaacattgtgtgcagccttacccttgcatatgcaaagaggttgttccggattcgaacccatgaccaacaagtcaccaaagttcaactttaccggtatgtcagggctcgccctcaaaactacctacctcattgcacaaaggctcctcgctatgcgaagataaaggggagggatattgtatgtagacttactcttacatatgcaaagaggctgtttccgaattcgaacccatgaccaacaagtcaccaaggcacaactttaccgctcaacaagataaaaaaaaaataataataaaaaaaaactgtagcaaggctgagctgtttctctttacataagaaattgcagttctcttgaagcagatatgagtaaacaaaaaccataaatataagcccatcatcttacaagttcaagggcaaagagatttcctaagagatatgagcattccactacaaccaaacacaccaaaggactatctaaatgacatcctcaaccaaactttaaggtctcgttttaatttaccaaatttgttccaaagtagaggacacaccaaacattctccaagaagctcagaaacactgtttcaaagaaaaaaatagtgaccttacagtttaagggctgcaaatttgcaccaaattgtttgccttgatcctgttaactaaagaagggaatggtggacacataaataactgtttgacttttaaacgggtttgagtggaagcatctacaacaaaacaaaccaggagttcaaagttcaaaactcaacgaaaaatgcaagtaattgaaattcactagtttctctacaaaattgaaagtctcacttcaaaaagcccttgaatagaataaaagttcataatgcgtgaattattacattacattctacaaatagtggttgtacaggaatagtaagtattatactacttgcctctcattcccgcgccatattgaaccaccagtatccatgactaccttaaggagctccaaggacaaaattttccctctcaagaggatacgatcgtcagggtgctgttgagatgagaatttcatagacagtttgcacaaattcttaaaaagtagaaacccatcctcccttattttacttccatcagctccagcttcattatcgaacttgtcggtacctgtttcatccgctgctttgggcgaaggtgtgtggacattctgcacttccagaggaggtgatatagacgatggtttgagaggaaaaccctcactggcctccattatctcgttgataaaattttggcaaaagtgtatggaattgccctcgttcaaattcttatcggtgaattccaaaagttcactaacagaaacccgtttaacaaagacatccatggagtcttcctcgactctggtgaagacaatggtcatgatctgagcaagaaccgatttagcacagatctgattagtgccgttgacccccccgaggtacacattgtaacaagttctcacaatttgaatgagacaatctgcccggatcaaaatgcagggggatcttacagctgagaggaagactctgagcacgcccagctcaatcgcctcctccccaaggccacccgacttacagatagcatcaatcatattgaagacaacgccggactgtgaagcactcgagttatcagggcgattgatctccccgcagacaaggccaagagagaacaatttaaaggtacattcaagagcaggctcaacaaccttggggtaggcagagtcaagcgcaagaaagagaggttgaaggacacagtcggcatctgaggaggaaagacctggaataggggattgggtgtcgcctggagacgtttcggaggactcagagagggattcaagcttgtcaagggtggatttacaggtggagacaaggtgagagtgcttacgccaggcggcgttcttgattatcttgtccagtgatggaccgacaactctgccgcagcgggaaggacctccaagagattgcgatgcggacattttcgtctcggcgatgaaggaaaaaaaaaaaaaaaaagatcatagaatttgctcacataataataccactgatcgaggaaaataactgaaatctcgtcccagtccgttcacagattcattatcctatcggctggagatttgggaattagcgtggatgaagcgctatataagcataactccgtcatttgctggttgagagcctctgcctcctgaacctacgtttgcgtaataaggaattgtaagctaaccaggcaacatgtaccacatggtaaacgcacgggtacccggatgtatggtttaggtcctttagatccgacccaacctagacaaccggattggatttgaaattttgttttttataatgtgtttgtctaatcctttattttattaaaataagcatttttttaataaataaatttaaacaaataaactcataatagttttgtttaaaataaataaagaaactttaaaaaaatactagtaatacatataaactccacatattcacagctaatgtaatgtcaaataataatcaaattgtccataatgttttacatggtcatacaaaaaaaggatcggagttaagcgttttgagacattctagtgggagtggtcattgttccaattttctcccaaattgaatttgaaaaatagttcttaataactgaactgaagaaaaatagttcagttcttaataacaacttagttaacaattttaatttaaaatattgaactgaaatatttgatttaatagctttgaaaaatgcaacattagttctaagcaatctctaattctctatcaacaatattcaagtttttgtacatcctatttctcttgtcgctctcattctttcacccccatcattttaattattttgttccaatttttcagcaacaaaatgcaaacctatatgctgtgaaataaagcatctaatattcagtttcaatttttataactatcataacctcaattgcataataaaaactaagagaaattttgaataagtgagcaattgcaggtaaaataccttacaagttacaacagcattgaatctgaaaggtatcatccaagctagaccaaatacattaagactggatgtcaaaaataactgacatgcatccattgaaataatagatattgtttcaaaggcttgaagcaaaacctagacactatgtacatgctagcattgcatattccatacaatctagaacaatgatctgttacgtttctgcaaattcaatgggtgtctctcctgacttcaaattttatgattccaagtaataaacatcataaactacaacgtcgttttctaattcttttataatatcaaaagttcaaaacagttcaacgtggtgtgaattgacctgttctctacatagttcagtttataaaaccgaacctaccaaatagttcagtttgagttttatataattaagtttcagtttaatttcaattcagttcagttcaattcatactagttattttacacaggccattcgattgtttgatggaatgccaaggtgctaatcgatcaagcccttacaattcgttgaagtcacttcttttaagatcaaggcctaagaaatgttgttgatcctgaattgactggatgcattcccatgcatctcttatacacgggtacactttaggaggatgatttgtacttaaaaagttatatatatttttaattcccccacaatagtcacattgaagcttataaataaagaataaggcacaacatataagacttttgaatttgtgaaaaatcaagctttgtctttgctttgttacaagtctttggatggtcatacacaagtgtttaatgtgcaatcctttttttttaaatttttttggaatatgttcttaattgtatatcctctatgtaacaattgatttgaattatatttcatcaaactattgtttgaaaagtcaaaaatgatttaatgatcaaatacttgggtgtttatcaatcttatggaaaagattttagggtgttccaaataatagtgtcaatgatgatgatggtggcaatagaaaaagtcattgtcaaatgcaaagaaggtgtattttttttttaactaaaaatcaaattcacaaaaaaaaaaaatcttgattttcaaaatgaatgtaaaagtgttttgaaaatgagttaaaaattatttcaactttatttttgttaaacacgttttgtattgaaaaatccatttgaaaatcaaaaatcaagaacatccaaccacccgaaagaaggctaaaaaatgtcattatatttaaatttaatataatcaatttacatataatgacaatttttggccgccacatgctcttttattaatattttaaaatttatcttcctcatcaaaagctacttaacgttcactggtcccatcttcttccccaaaccttccatccacatctaacaatacccattttttgaaagaaaaaaagacaaaaaaaaaaaaacaccaaaccaacactttcttttttggctcatgttccgcatggcatacccaacccatttcaattggttggttgtcaacattgtaaccttaaccaaatcctacaccttttctctctatttggggtttctttttggaattgttaaaacgattttgcattgtgaagatgacggtgaagaagggtgttgaaatgatgtcatagagtgttttggaaaggaatttgatttagctagtgatttttgcttaaggtttgcaaagagaatttgtggagggaggttggtggttctaaaacaagagggatattttgattcttggaacttgaggatttcacttttgatggcgtgagaattggaagttagggactatgttgtggatttgttatacgattttctacaatcgaagatatgtcgttgacaatttggtgtgaaaagaagttggtggtgacacacaagctcttcccatgagatcatgatgaggtttaagtcacaggattagcttgtgtccacgacaaataggggtggaaacaggtcagacaagaccagacttggttaggcctgatttaaaaacataaagcttggcctaacctatttacctgtcataggattttttttaagcttggtctgacctatttaaaagcctaatttgacctacaagcctattaaaaagcctatttttaataagaaaattaattttataaaacactttaaatcaatttaggaaagttaaataaacaattttcaaatagaaaatgtctcaacatcttacttatattttcaaataagtaatgatcattttatgggattttcaaggtgatttttgaagtgattgatcatccaccttcataataaggaaatttatatttttagaaaaataaatatattatttttaagttttaatatatatatatatatatattaattaggtcaacctgatagacctaatagatttttttaaaagcttaagcatgacctttttatgtaaacagacttttcaaaaagtcttaacctgaactttataataaacaagtcaggtcaggtcaggtcaaaggtccttataggtggtcgacctattttcatcccaacgataaaggagagagaacatcttaaaataatctttattttttttaacttaatgtcaaattaatattaaaaaatataacttaatattaaattggtgttttaaaactattgcttaatgacaaaaatggtctcataagtcataaaactaaaaatgaggtgtaattatcacacattaactaaatttaaattttgatttttcataaattaaattatcacaaatttacaaattcaacatcataatgtttatttacccttcttaataaatttgacaatataaaaaacctttgtttaaataatatgtatccccttcatcttttcataccctaatttataattattataaatgaaataattatatttgatgtcatctttttttggatgtttttattctcaatttattatcataatattttattttaactttcaacgataataattacattttttttaaataagttacattcaaactatatatataagtgactttcaagtgggagtcgagtgtctttgtttcattaataatcataatcaaaattgctcaaataagatcaaatcaaataaaacacatcctttacctttcccggacctcacggttgtcaactcagttcagccgcacgacctcctcccaagtcccaactctccctctccccctccctcacgccttgctctctcagccaccgggcggtcagccgttaagaaagaaagctatcgcgagcacatccagcagacgcccacgacgccaccgcagtcagtcacttggtcgggacgctacctcttgtcacccatttgcgagcttgcaccgtcgcgactccacccccaacagccgctgtgaccgtaatttttaaataataatttctgggctgtttacttgttcttgtttagttgctccaattattggttcttcgcgtacagaagaaatatttcagaaaattatttatgttgttgattatttagtatattagagttttcgtgttcatagaaaggggttgtaagctgcatctgtatatcacatgttgtagattttaactataatttttttctttaaaaaaaaatgaggcccagcttatattgaacctatatatgtctggctaattgtgttatctatgtgagttctatgtaagttgataatctgctttatagtaatatcattgcattagtcattaaaaatatagtattgttcttcacattcgtctctaacgtaatgggattagttagacatagcagggtcacagaatctttgccatttcattatgacttatgagtttgaagttctcaattgattaccttttcagcattaatttatggattttgtttaaaaaatttaggtaggttgactctgtaacatgtcaacccaccatatttggtataatcctgatcataattcccctcgtcccttacagcacaaatgagtatcactagacagcgtacccttggtggtgggggtcatcatgtattggactacttgaagcgcatgcaggcagataatcctgctttcttttatgcagtccaggatgacaataatctcgcgtgtgggaatatattttgggctgatgcaacatctagaacaaactactcttattttggagatgctgttatattggacacaacctacaagactaaccgatgccgggttccatttacctctttcactgggttgaatcatcatgggcaacctgtgttatttggttgcgcattgattttcaatgaatctgaattgtcatttatatggctattcaggacttggcttcatgccatgtctggcggccaccctgtctctattacaacagatttggaccctttcatacaagttgctgttgcccaagttctcccttcaactcgccatcggttttgtaaatggagcatattcagagaaacccgaggcaaactggctcatttatgtcagtcacatcctgcttttgaaactgaattcaagaaatgcgttcaagaaagtgagactattgatgagtttgagtcttattggcactcactcttggaaagattctacgtcatggacaatgaatggcttcagtcaatgtacagcgcacgacaacattgggttcatgtgtacttgcgggagactttctttggagagatatctttgaatgaggaaaatgaatatttgaattctttctttgatggatatgtgaattcatccaccactctacaggtattggttagacaatacgagaaagctgtgtcaagttggcatgaaagagaattaaaagcagattatgacactactaatagtagtccagttttaaaaacaccatctcctatggaaaaacaagctgcgagtctttacacgagaaagatattcatgaaattccaagaggagttagtagagactcttgcaaatcctgctacaaaaattgatgattcagaaacaatcactacatatcgagttgccaaatttggggaaaaccaaaaatctcatgttgtgacttttaattcttttgagacgaaagctagttgcagttgtcagatgtttgaatattcaggaattatttgtaggcatatactgtcagtcttcagagctaaaaatgttcttactcttccatctcagtatgtattgacacgctggacaaggaatgctaaaaccggtacattgttagatgaacatgcatctgaattgccaagtacttctcgtgagtctgtaacagtttgttataacaatttacgccaagaagcaatcaaatatgttgaagaaggtgcaaaatcaatccaaatctatcatgttgccatgagagctctgcaagaagctgctaagaaggtttgcgcaataaaaaatcagagttctggaacagcagagggagctatagtaaccaatggaagcaggggtgaattgcttgtagcagatgaagatgttccaagcaatcaatctgtggttagtttctttgaacttaagatcttttccttagatgataaagccattaggttctcactagaacaattatgtacacaaagtctttccctggcaaattctacaatgagctgcatccaaggaactatatactattactgtacatgtttttgtgttgaagcaaaaaaaaataatgtacaaaaggaaggggcaattccccccgcgtacaacctccaagctggcacttggaaatcatgcttgttgttttctaggtaatgcttttcaatgtggtaagtaaataacatttatgtttgatcttcttcaaattgctaccaccaactttaaacttgtctcaattaatccttaaactttacataatataccaatgaggaatactagcaatgtattctccttgggtttttgtgggctgcaatgttaacgctatgataattgaatgagacatttaatgttggggaatcttatagatgggtatttattgctgatcgttgggatgggaagggataatatcttgtgcaatttgattggctttttgtttggccctgttatgcaaatttgtatatgggttagggtaccccttgtaccttttttttaatataatttctttttattggctgtaaaaaaaaaaaaaaaaaactagcaatagattctctaatactttcttcttaagactctctcatattagttgaactgcatgtgagttctactagtttggggatgtgaccaacatatttagtgggaccaacatgaattctaccttataaagagtttgttggaaagaaaatgttagtgtgttgctagtatttctcatatgccagtaaatccttttgttttttatagcatcctttaactcattacagaggtgtgcttaccatgtgaacacttgatgacatgtcaaaagactatccatccatgatcgccaaatcctcacaatccatttttttctgctttatttgtttatttaataaatgttcataaattagaaaaacacaattatctttttacacaaaaacccaagtaaattgtgaaatctaatatatttgtcaaaaactgggaagattgaattaggaagaggtaaatatcactttgatgatcaaatctctagaattagtgggtttgcacattttggttggggagctatgctttggtgtgcatgcagttgtagacaggttgcatcttgattttaacctatgttctggctggtgacagtgggtggtggtgatggtgagtgatggtttaggattaatgcattatagatttctctgtctctgtctcatttatttttgtgcaagatttttgtggtacatggttactgtttgagtgatgttgtggcatggtggttggactcgatgccacttactattttttaaattgatgattatttaaaaacctcgtaaattatattttaaaacaaagagatttttcataaaatgaatgaattagatgtcacgtagctcttcccttgttgagttaaatggtagctaaacagaagggtctattgtaatattttttaaagttaatagattgggacaaatttaacgttggtggtgccattttgcaaaaggttcaaagtttaagaggctgattgtaattttccttgaaaaatatgtgctatttatactattttatgtgaagaatctgattgcttatgttgtggttataacgtgcttgtttgtctatgatggacttctgcaacttctatgaccatggtgatctttttttctcatcttctccagtaatttaagaaattgaatttgcttagcctgtaagtttaaattgaacctcttaaaattgaggctgttttcatggattatatttgtgctcatcttgctaagtttttaacattatgctatatataaagtttccttttcactaattattttatagaattatggcacaaaatttatgtgtatttggattttcctaagcgtacacattagagtgagaactgacaacatcttcctatatgtgttgaatatagaatttgaatttgaattattgtttctcttagataggaacaggttgttaaaatagtctagataagaataagtttaaattattgtttcctaatattgtgctcaggatgttaacattacttgtataaatattcctcatttaagaggtgatggatgagtgaatgaatggatgaatgagtgagtgaatgaataagaaattattatttcaatttatccgtatctgatttttaacaatatgtggcctgtatttttgttaatacacgtggtattataaacaaattccctttggatcctatgcaacaggccgagaagcaaaagaaaatccgagagttgactgctgagttagaggtcacaaatcaacgatgtgaagtttatagagcaaacttgctggctttgctaaaggatatggaagaacagaagttaaagctatcagtaaaggttcaaaatgcaagatttagtttaaaagagtgactgccctgattgcaaagggttttaatgtatgcctatctgtccattttgattcctcttagggtatgttaataacctttgtgtagtttatcgtggtccatgtttaaatataatgtttgtgcttctgtgttttctaatcctgtaatctgattgaatatttcaatttctcgataagttattaattgtactattaacttctcgggcctgttaacgaatagaagaaaaaatcaggggtcttcagatgaatttgttggttttcttctattctcgagttacaatatattttggtgggtctcacatctcattaatgattcattctcctgatttagatgtgagtagaggtggaaataggttaggtcagactttggtcaggctttgacaggtctgagcctgatttacatcataattactaagtttgagcctgatttatttacttattacatgtatttttttaagtcttaacttgacctgtttaaaagtctgatctgatatgaaagtctgcttctatataagggtctataaacaagtcaatagacctataggcttaaacaagccaatgagcccaaataggccaatgaattttgttcattacctaaattattcaatgtttcctaaagactaataataataaagaaaagaagaaaattttagcaagcataagtcattatattaaaaaatgaacctgtgatcctctcccaaaattaaataattcaaatttacttttcttcttctataaatgtataattattaatagtcaaatccaagcacaaaatgggcaaggattgttgcataaaacttaattacaagtagcatcataccaaaacctattaatataaaacaaaatattggtgaaaagacaagaactagcagcaaatacttaccctaaacatgatcattactaaaaacataatgtttttgtctcttaagatacccaaaaacatatccaaaataaattttgcagagtaggagaattcttgatggactttgctatttccatccccattgtttgctatttccatcctccattgctatttaaactcccctggaaagtcgttatttttagtgataaaaatgccccttaaaacaaaaacaagtttctattgtatatgtctatcacttaccattgaaaactttttcctgttcaatgggtaatattaactacttattagaatcattggagggaataataataataaaggatggattaagtttatctaagagtaactcttttgaaattaatccacactctcacaatttattttcttaaatcttatagtttgaatgttggagagtccaaccaagaaagacgaaaaatttgaaaagaaaaagccttcctcaaagcacacatgaacaagtttaagagctcatcgagtggatcaataaatgataatgtaagaacttttttgagtttgatagtagtagttcatcttaatctttatcaaatgatgaggaaatggcttatgatgttcttcaaaacacacatgtgatttttgtggaatataagtataaagaaagtacaagttgtttgtgaaaatatttctctaaagaaatcaactatgatttttgagaaaaaggttaagactttagaagaaactcttgaaagagctaaagtaattgataagactgattatttatttgaagtcttaaaactgaaaggggaaataacatgtcttactatagacttaataagatttttggatggatcaaacatgctaaaaatgcttttaaaaaagtcataaggatccattggacaaatataggcttagactatgatcaagaaaaggacaagacatcctcttcgccatcttctcagtcttacagaactctggaaattttgggagaaatctagatatgtggagtttgaatgtattcataaaaggatataaatagttaataaatctaagaatactaacgtgaaaaagacttaaaaagatttgtataccaaaattttaaattattgttattacagatattcttaggcaatcccttttactaaataatttgtatgaaattatgtggttggaattacagtgtattgtgagttattagaaattaactatacaatttgatatccaatttgccaagagagatccaagcacattgacatagacagtcatttcattaagaaaacatgttcaatctgacttcaataattgattcatgttgctttaccttggaagatgttgctctacaagtgagtttatgcattgatggtagaccaattactgacccctgctaatcacattttccctatattgcaaaagatcaaactacaccatgtaaaaattgtgccctacatccaccacttcaaaattgtctgtcaatttgcatattgttttcaacctaccatgcatcatgaagaaactaaggctttatatgatctccctcttcaaactcaattatgaatatgttatttactatcaaattcacttcttccctccttggaaggtccacttgatgccctctcattttatctttaaatatgacattgtttttaccacctctatcccgcccatttggtggtttttgaggcaaaacaacactttttttgcaccaaaacatctctggagaaattcattggacatgatatattgtgaattaccccctatggtctaaataaggccctttggagataatcacacaaatcaataaaaaaatttatgtagttcattttattgacttttaaaataaatactactaatgtatcaattttatccttattaataatcattaacttgttatgagtgatgcggaaatattaaagtctacgagtcgtgaatcaccatcaataacaagtacaaatactctctcgactctcgagtcttgattataagaagaaaaagacatgtttcacacttatttaggaaattagtgaacttcattaaattatgtcattctaaataaaaaatagaaaaatattaggaacactttctctaacacactacttcaaacactctctctaattgatgaaaatttattgaaaattataaaatcaagataatcattatatgtgatgtgagacctatcagattttttcattttcaataaattccagccaatgaataagaatgtgtgtgaatgagtgtgttcctatcatttctctaaaaaataatcttttttcctaagctatcttttattgaaatttgatattaaacataaaaaggttaactatattaaataaaggatattctaagtataatctcattaaataatactttataagttaagatttgtttatatttcaaataaaaaaataagaaatttgtgttgtttatatttaagacatgaaaaaatatttaaaatgtttaaaatatttaaaatatttaaaatatttaataataacaattaataaaaattaaatattacataagaattgtgaaatgccttataaaaaattcatcaattcattttaaatttgtcttataataagaatcacataagagtattttcatgttattttattattttattttaagtttatttaacttgtgatgataatacccctatttaaaaaaataatagttgtgataaaataatataataacgaaatatttttgtgactatgatattatgtttaaattatttatttatttaatgaatgactgaatttacgagatatttattttttccaaaaaaaaagaatgattaatcaatttaactcaatttacaacccaccagattagattaaggtcagttgaatttagttaaccgatttggagagaggaatggataggtaactattggcaagcaatcaaattagattaatgttatctttgccagcgcaattttagatcgcataggaggttgtggctaacgtacgccaatgctgacctccacacaattcggtttaaataaagcatattctctctctttccaattccaaagcgtcgttttcataatcgtactagtgtctttcttcatcctcttcgtgatcgtcttctgttgttgctccacttactatctttatttttctaaaattatttttccaattctatccttctcgcttcttagcttagccgttcgtcatcgatccagaaacgataaaggcagtaaaaaagtgacaatggatctgtttgctgttcatgcaaagaaccttttccacacaaattcgttttgccacagacccattcccttcaatttgggaaggagcaaagtgtttcagatcactgttttgaggagaaacccttactctaaagggtatcgcccattagttgtcagcgcctcggggaagaacaatcatgacaacaactcctcttcttccggtctgttatttcctttcatttcctttaaataatctataactgcttgttggccttatttgtctctctgtgattacaattacattaaagacacgctacatgacatgcatgtgatttgcattaggttttctttgggtcttagggtttcgaggggaaggaaaggttggccaaatttaacaaatgaaagaattgatccaagaaaaatagttattgttgcctgtttgttgagttccttcatgacattgaattcaattttctttcaagaacttgcttctttccatgtgaaacaaagctctatcttgaattgatgaaaatgaggaatggtcatcggtcatccctttttttaaattatgatcagttttaaaatttccaactcgagtgctatattatgcttttataatatatacaacaagtgaagagttttgcaattgtgtcacttaaatcttgtgttatttcttacaaacttcatacatatttgtaatgtgagaaaatatttcataataactagattaaaataatcagtgactttgaaagttgttagcgtgtggactcctgtggttgttgtaagtatagtttcattgtttgtttacctccttccccttctttaaatattttaatcataaaaggaggatatgttgtttctttttaatctatctttctcaatggggaagaatgtctgacaagaggtccttaaagtttggtatatagtggcagggttgttaatatagtctgttatgcatgcatttcatagcttttttggatttagctttatttgcattcaataaaagtttgcagcaaaaatatcttgtttgagcagtttaaaaatgacatcttcaggagtttgaaaatattagacggggtttcactagcggagactcttggaacagctggagtaagaagtccccaagtaagcgtattatatcttcaggagttgctgaacttagtattgaaggttgtatttcactggtttagtagttaataaatagtataaaagcttttaggtgatggaaaaaccttcaatttaactgttttgtaaaattgcttccccctcccatttttgagtgttttgatggctgtttctgatttgttaattcccattctttcagatttatcttctagatatttatgtgttttacacacttgtatcggctgtctacggattcttactgggggcaagagatcgactgggagaggtaagtacctttttgataatatgctgttattattaatatcttttacctattgctagtcttgtcctgtatatttcagaatttaagattagttggcataactttttttgtggttgtatgtggtcaccagattaggtcattggaagcactgtacaaactttttgagcagtttcctggagcttttatggacacacttcatgttcctctacccaacaggtgctgcttgtgaaatgtgctttttcttgttttatgatcttcattctgtatttttggaagatagttgtatatgtatgtgtcctatctttgttgtagctctctgagaatatatcctctcttctttcagattttccccttaattactactttttttgtataagcttatatagtttttctcaatattttatattttcaggagttcctatcagtcgtctgttcaggtcagccttttgctatagataaaggaaaacataatttggtctaaattcatgtttatttgcttgatacttgtgtactaacactaaaataagaaactttttatgttgatgggaaggttacagtacactggtctcatgtttgctgaacatttgttttgaacttgagtaaatattacttattcaattactcttcatccaaaggttggaaagaataacaaggttgatgctgctcggtttgcccccttttggaatgagatcataagaaatctaagggaggaggattatgtaaccaacttgttagtcatggaagcggctatacattttcttggctttatttatctttcttctttccttcttaattaatacctgaatggtcatgttttccttgctcacagcgaaatggagttgcttttaatgcctaggaattctggggatcttcctctggttcaatggccactttttttctacttgcaagcaaggtatttcagttattataatcattgttgtgtttcaaaggtctttttttgagtgtttaatcaaatactctgtaattgttcaaattttatgtttatgctagaatgtttggtcctcgtgtatatctgaatatctttattcgtatgatttctaagtagtttttttctagattttataatatttctttatgattaatactattagctagtactatcactaatggggtttaatgttctgtttttttttttgttgaatcataatatgccacaacaatttggtatcctcttattctgagtctcttttctcctttcttacctgaacactaatcattttctagttgtttcagtactcaattttaataacttgatatggatactgttcaatatacttaaatgcttgctgctacaatttcttactatatccttataagtgacaaacattgaaagaatttttgtttctagaaaactcaatcttcataaaatttggctcaaaatgagggatgccaccatataagaaaatcaattaaatatctttgctgttgtcgtcacctcaacaaagtttgtgaaaatatgtggatttctcatttgggtcaatacaggaccctaactaatgtgggctttatctggatgatgcactagtagaatcctcaatcttgtctagccacaatttgtgtcttcccagatttgtattgatgacatgaattgatgtttttgagaatataattaaattgtacaatatgaataaaaaacttacatttctgataactttggttcaaatttctagattttatgctgctctgtttgctttatttgaaaattgaggcttatccaactagaaaaaaaatatgcttccatctaatgatattgaaaaaatgtgcatatgtgaattttagtcattggttatatatagggaagtgtacaatgttttgtgaactgtaacacaatagtgactacatcttatcccagatgcttaacgtatgtatttatgccatattggtttttctcatttactgactttttgctcttattttttctttttgttaagattcatttatttgttcttttgcatgattgtgtagatatttttggctagggatactgctgttgagagtaaagataatagttgtgctttgggataggatttcccgagatatgattatatgatgtatatgctgtttaggagtgttactatactactaattcattttgacaaagacatcagatgatgtgggaaggacgtggtaagtataatttgtaacaattagtgtatcgagctgtgtttcctctatatgataaacctgaattatgatatttgatatgtttggggtttggggttttggggttttgggggtatgggatttgggggtttggcatttttagggttagggtttttggtttttttttttgggtttggggtgtggggtgtagggtttagtgtatctcatacccactaatatgtacaagacatcaatacacttggtcataaaatgcactggacattctcctcaggaaaatctcaacatatgttctgtatccctattctgtttcagtactcttcaatctttattattcgttttccaagtggtacaaccacatatcactcaagactcctgatccaaaaattgaaacaaaacccttcccatcatctggccaccaaaagttcagtaatttaagaataataatacttttcctaatcagcttaaaagttagtttaggcaataaacaaatttgaatagatctgtaagacaccagatcaataatatctgtgtaggttcaaaaggccatgcatcagattcaacataatgtaatttttaccaacaaaaaacaaggaagaagaaattggaaataaaatggaactataattatagaacataagaacaatataaattgaaatatttattgtttgtttcagattaataaatttggtttaattgaaaattttaactttaaaaaaaataattttttgtatagaatatataataaaaattattttaatgtatgtagttagaataaaatattgataacaaatataaatataccattaaatattaatttccatttttttattgaaatttgattgatatattaaatatttgattgttttaatcaaaggcttgtactagtgcactctataagaacctgttctagacattgagtatactatatatatttgatagatttggattgttgttcttaaaggatgtaaccctacatgatctggctgccaatgcacgacctaaagggggacaagatattgtatctcttatgggtcggatgatgaaacccaggaaaacagaaatcactgacaagttgagacaagtattttcttaacttttaatacaagtttgtagtttcttttttaaatagttagggggaaaattagggtttcggggattcggggttcggggtttcaatgttcggggtttcggggtttcggggtttcgggggtcggggttcgggggtgggggttcggggtttcgggggtcggggttcgggggtggggggttcggggttcggggtttaggggttgggggttcggggtttggggttggggtttaggggttcggggttgggggttcggggtttgggggtttggggttcggggtttcgggggtcggggttcgggggtgggggttcggggtttgggggtcggggttcgggggtgggggttcggggtttggggtttaggggttgggggttcggggtttgggggtttggggttgggggttcggggtttgggggtttcggggttgggggttcggggtttgggggttcggggtttgggggtttcggggttgggggttcggggtttgggggttcggggtttggggtttcggggggttcggggttcgggggttcgggggtttgggggttcgggggttcgggggttcggggttgttcggggttcggggttcgggttgggttcgggttgggggttcgggggttcgggggttcgggggttcggggttcggggtggggttcgggggttggggttcgggggttcggggttcggggttcgggggttcggggttcttcgggggttcggggggttcgggttcgggttcgggcgggttcggggttcggggttcggggttcggggttcgggttcggggttcggggggttcggggttcggggttc
